(19) United States
(12) Patent Application Publication
(10) Pub. No.: US 2023/0279404 A1
(43) Pub. Date: Sep. 7, 2023

(54) ENGINEERED OXALATE DECARBOXYLASES

(71) Applicants: Codexis, Inc., Redwood City, CA (US); Societe des Produits Nestle S.A., Vevey (CH)

(72) Inventors: Chinping Chng, Menlo Park, CA (US); Nikki D. Kruse, San Carlos, CA (US); Joyce Liu, Fremont, CA (US); Adam P. Silverman, San Carlos, CA (US); Rebecca Hong Thibodeau, Honolulu, HI (US); Tricia Windgassen, Redwood City, CA (US)

(21) Appl. No.: 18/167,614

(22) Filed: Feb. 10, 2023

Related U.S. Application Data
(60) Provisional application No. 63/309,397, filed on Feb. 11, 2022.

(51) Int. Cl. C12N 15/52; C12N 9/88; A61P 3/00; C12N 15/70

(52) U.S. Cl. CPC C12N 15/52; A61P 3/00; C12N 9/88; C12N 15/70; C12Y 401/01002

(57) ABSTRACT

The present disclosure provides engineered oxalate decarboxylase (ODC) polypeptides and compositions thereof, as well as polynucleotides encoding the engineered oxalate decarboxylase polypeptides. The present disclosure also provides methods of using the engineered enzymes and compositions thereof for treating diseases or conditions associated with abnormal metabolism of oxalate.

### CROSS-REFERENCE TO RELATED APPLICATIONS

[0001] This application claims the benefit under 35 U.S.C. § 119(e) of U.S. Provisional Application No. 63/309,397, filed Feb. 11, 2022, the contents of which are incorporated by reference herein.

### REFERENCE TO A SEQUENCE LISTING, A TABLE, OR A COMPUTER PROGRAM

[0002] The Sequence Listing concurrently submitted herewith as file name CX7-220US2_ST26.xml, with a creation date of Feb. 10, 2023 and a file size of 3.11 megabytes, is part of the specification and is incorporated by reference herein.

### TECHNICAL FIELD

[0003] The present disclosure relates to engineered oxalate decarboxylase (ODC) polypeptides and compositions thereof, polynucleotides encoding the engineered oxalate decarboxylase polypeptides, and methods of using the engineered oxalate decarboxylase polypeptides and compositions thereof for therapeutic and industrial purposes.

### BACKGROUND

[0004] Oxalate is found in many foods, such as leafy greens, and is also generated in the body as a metabolic product from the digestion of amino acids and ascorbic acid. In healthy individuals, oxalate is excreted in the urine (urinary oxalate: UOx), about half of which is derived from diet and the rest of which is generated as a metabolic product (Holmes et al., Kidney Int, 2001, 59(1):270-6). UOx can be variable in healthy individuals, but a level above 40 mg/day is considered hyperoxaluria.

[0005] Hyperoxaluria is generally divided into two categories. Primary hyperoxaluria is a rare genetic condition caused by mutations in alanine:glyoxylate aminotransferase (AGT) or glycolate oxidase (GO). Secondary hyperoxaluria, sometimes referred to as enteric hyperoxaluria, is a condition in which excess oxalate is absorbed in the gastrointestinal tract, which may arise from a high oxalate diet, fat malabsorption, changes in flora of intestinal oxalate-degrading microorganisms, or genetic variations of intestinal oxalate transporters (Robijn et al., Kidney Int′l, 2011, 80(11):1146-1158). Numerous conditions that may lead to secondary hyperoxaluria include Crohn’s disease (Hueppelshaeuser et al., Pediatr Nephrol., 2012, 27(7):1103-9), bariatric surgery (Lieske et al., Semin Nephrol., 2008, 28(2):163-73.; Agrawal et al., Surg Obes Relat Dis., 2014, 10(1):88-94), short bowel syndrome (Emmett et al., Am J Kidney Dis., 2003, 41(1):230-7), cystic fibrosis (Chidekel et al., Yale J Biol Med., 1996, 69(4):317-321), and celiac disease (Ciacci et al., J Urol., 2008, 180(3):974-9).

[0006] A major effect of hyperoxaluria is urinary calcium oxalate (CaOx) formation. In normal individuals, calcium binds dietary oxalate in the colon to form CaOx, which is excreted in stools. In hyperoxaluria, dietary calcium is depleted by binding to non-absorbed fatty acids, and excess oxalate remains soluble, allowing it to passively diffuse across the colonic lumen and into circulation (Nazzal et al., Nephrol Dial Transplant., 2016, 31(3):375-82). Accumulation of circulating oxalate in the kidneys results in high levels of excretion in the urine and buildup of CaOx stones in the kidney (nephrolithiasis). Furthermore, renal calcification (nephrocalcinosis) often results and contributes to the development of chronic kidney disease (CKD) and end-stage renal disease (ESRD). Many patients with hyperoxaluria have recurrent kidney stones and experience severe kidney damage over time, which can lead to CKD, ESRD, and death. UOx levels appear to be directly correlated with the risk for increased frequency of kidney stones and CKD (Curhan et al., Kidney Int., 2008, 73(4):489-96).

[0007] Treatments for hyperoxaluria include increasing fluid intake to increase urine excretion and thereby dilute UOx and treatment with alkali citrate, which forms a complex with calcium, thereby reducing precipitation of CaOx. While patients with primary hyperoxaluria may not benefit significantly from dietary oxalate restriction, patients with secondary hyperoxaluria are advised to avoid foods high in oxalate content and/or consume a diet high in calcium or calcium supplements. Although increasing dietary calcium appears to have an impact on increasing oxalate precipitation in the colon, high-dose calcium supplementation may increase CaOx urine supersaturation if high urine output is not maintained. A different treatment approach uses bile acid sequestration agents such as organic marine hydrocolloids (OMH) and cholestyramine to reduce the adsorption of oxalate. However, the efficacy of these molecules is not clear, and there are potential issues with long-term use due to worsening of steatorrhea and malabsorption of folic acid and fat-soluble vitamins (Harper et al., Postgrad Med., 1991, 67(785):219-222).

[0008] Therapeutics in development based on recombinant technology includes an engineered bacterium (SYNB8802) that degrades oxalate in the gastrointestinal tract (Puurunen et al., J Urology, 2021, 206(Supplement 3):e378-e378), a recombinant oxalate decarboxylase from B. subtilis formulated as crystals to increase its stability and activity (Reloxaliase®; Pfau et al., Nephrology Dialysis Transplantation, 2021, 36(5):945-948), and an oxalate decarboxylase from Synechococcus elongatus that upon oral delivery degrades oxalate in the gastrointestinal tract (Quintero et al., Kidney360, 2020, 1:1284-1290). While the current enzyme-based therapies under development appear to reduce plasma oxalate in healthy subjects or patients with severe enteric hyperoxaluria, desirable are alternative robust therapeutics for treating hyperoxaluria.

### SUMMARY

[0009] The present disclosure provides engineered oxalate decarboxylase (ODC) polypeptides, biologically active fragments and compositions thereof, as well as polynucleotides encoding the engineered oxalate decarboxylase (ODC) polypeptides. In some embodiments, the oxalate decarboxylase polypeptides of the disclosure are engineered to have an improved property, including, among others, enhanced catalytic activity, reduced sensitivity to proteases, and/or increased tolerance to and activity at low pH environments. The present disclosure further provides methods for using the engineered oxalate decarboxylase polypeptides and compositions thereof for treating hyperoxaluria and other disorders characterized by elevated levels of oxalate.

[0010] In one aspect, the present disclosure provides an engineered oxalate decarboxylase polypeptide comprising an amino acid sequence having at least 70%, 75%, 80%, 81%, 82%, 83%, 84%, 85%, 86%, 87%, 88%, 89%, 90%, 91%, 92%, 93%, 94%, 95%, 96%, 97%, 98%, 99%, or more sequence identity to a reference sequence corresponding to SEQ ID NO: 2, 4, 172, 320, 396, 616, 670, 750, or 906, or to a reference sequence corresponding to residues 1-359 of SEQ ID NO: 172, 320, or 396, wherein the amino acid sequence comprises one or more amino acid substitutions relative to the reference sequence corresponding to SEQ ID NO: 2, 4, 172, 320, 396, 616, 670, 750, or 906, or relative to the reference sequence corresponding to residues 1-359 of SEQ ID NO: 172, 320, or 396.

[0011] In some embodiments, the engineered oxalate decarboxylase polypeptide comprises an amino acid sequence having at least 70%, 75%, 80%, 81%, 82%, 83%, 84%, 85%, 86%, 87%, 88%, 89%, 90%, 91%, 92%, 93%, 94%, 95%, 96%, 97%, 98%, 99%, or more sequence identity to the reference sequence corresponding to SEQ ID NO: 2 or 4, wherein the amino acid sequence comprises one or more amino acid substitutions relative to the reference sequence corresponding to SEQ ID NO: 2 or 4.

[0012] In some embodiments, the engineered oxalate decarboxylase polypeptide comprises an amino acid sequence having at least 70%, 75%, 80%, 81%, 82%, 83%, 84%, 85%, 86%, 87%, 88%, 89%, 90%, 91%, 92%, 93%, 94%, 95%, 96%, 97%, 98%, 99%, or more sequence identity to the reference sequence corresponding to SEQ ID NO: 172, 320, 396, 616, 670, 750, or 906, or to the reference sequence corresponding to residues 1-359 of SEQ ID NO: 172, 320, or 396, wherein the amino acid sequence comprises one or more amino acid substitutions relative to the reference sequence of SEQ ID NO: 2 or 4.

[0013] In some embodiments, the engineered oxalate decarboxylase polypeptide comprises an amino acid sequence having at least 70%, 75%, 80%, 81%, 82%, 83%, 84%, 85%, 86%, 87%, 88%, 89%, 90%, 91%, 92%, 93%, 94%, 95%, 96%, 97%, 98%, 99%, or more sequence identity to the reference sequence corresponding to an even-numbered SEQ ID NO. of SEQ ID NOs: 28-1622, or to a reference sequence corresponding to residues 1-359 of an even-numbered SEQ ID NO. of SEQ ID NOs: 28-614, wherein the amino acid sequence comprises one or more amino acid substitutions relative to the reference sequence of SEQ ID NO: 2 or 4.

[0014] In some embodiments, the amino acid sequence of the engineered oxalate decarboxylase polypeptide comprises at least a substitution at amino acid position 4, 5, 6, 7, 10, 11, 13, 14, 16, 17, 18, 19, 22, 26, 31, 33, 35, 37, 40, 43, 44, 46, 52, 54, 60, 61, 62, 63, 76, 79, 80, 82, 83, 85, 94, 96, 97, 103, 104, 106, 110, 117, 121, 123, 124, 125, 126, 128, 141, 149, 153, 155, 156, 160, 162, 164, 166, 169, 173, 174, 176, 180, 182, 183, 186, 187, 188, 189, 190, 193, 195, 196, 197, 199, 200, 205, 206, 208, 210, 212, 216, 219, 226, 227, 232, 233, 234, 240, 242, 243, 263, 265, 266, 267, 269, 270, 273, 274, 277, 284, 297, 301, 303, 304, 314, 316, 318, 331, 335, 339, 342, 343, 346, 347, 350, 351, 356, or 359, or combinations thereof, wherein the amino acid positions are relative to the reference sequence corresponding to SEQ ID NO: 2 or 4.

[0015] In some embodiments, the amino acid sequence of the engineered oxalate decarboxylase polypeptide comprises at least a substitution at amino acid position 13, 14, 16, 17, 26, 31, 37, 60, 79, 83, 96, 162, 174, 195, 196, 210, 226, 277, 301, or 318, or combinations thereof, wherein the amino acid positions are relative to the reference sequence corresponding to SEQ ID NO: 2 or 4.

[0016] In some embodiments, the amino acid sequence of the engineered oxalate decarboxylase polypeptide comprises at least a substitution at amino acid position 31, 210, or 318, or combinations thereof, wherein the amino acid positions are relative to the reference sequence corresponding to SEQ ID NO: 2 or 4.

[0017] In some embodiments, the amino acid sequence of the engineered oxalate decarboxylase polypeptide comprises at least a substitution or substitution set at amino acid position(s) 346, 124, 359, 174, 173, 123, 196, 304, 301, 347, 11, 284, 210, 169, 216, 195, 339, 4, 6, 180, 80, 243, 182, 7, 226, 156, 183, 227, 219, 62, 343, 16/26, 16/26/242, 16/26/183/232, 155/206/242, 16/26/339, 16/26/155/206/339, 26, 26/206/339, 31/82/210, 31/82, 31/356, 31/97/226, 31/240/270, 31/82/226, 31/240, 31, 31/210/318, or 31/210, wherein the amino acid positions are relative to the reference sequence corresponding to SEQ ID NO: 2 or 4.

[0018] In some embodiments, the amino acid sequence of the engineered oxalate decarboxylase polypeptide comprises at least a substitution or substitution set at amino acid position(s) 13, 212, 124/196/210/226, 5, 16/26/124/155/195/210/284, 196/226, 16/155/195/210/226, 16/195/210/226, 16/155/174/196, 16/195/226, 318, 16/195/196/210, 16/26/124/155/174/196/210, 195/210, 26/155/174/210, 316, 60, 16/155/174, 16/124/174/196, 16/226, 16/26/174/196/226, 17, 331, 124/195, 16/174/196, 188, 195/196/210, 174/196/210, 16/26/155/174, 16/155/195/196/226, 195/226/284, 16, 240, 16/26/124/155/195/196/226, 183/232/339/343, 183/206, 63, 173/347, 16/26/174/196, 16/284, 46, 16/124/195/196, 274, 174/196, 155/174/196, 174/196/226, 16/124/155/174/195, 16/26/155/174/196, 26/174/196/210/284, 16/195/196/284, 174, 16/124/174/195/210/226/284, 16/174/195/284, 26/174/196/210/226/284, 174/196/226/284, 124/174/196, 26/174/195/210/226, 162, 16/124/195/196/284, 206/343, 16/195/196, 16/26/174/195/196/210/226, 155/195/196/226, 18, 335, 124/155/174/195/226, 26/155/174/195/226, 195/196, 153, 155/174/195, 174/195/210/284, 174/195, 37, 124/174/195/226/284, 176, 16/155/174/195/196/226/284, 10, 169/173, 155, 33, 173/183/343/347, 104/265, or 233, wherein the amino acid positions are relative to the reference sequence corresponding to SEQ ID NO: 2 or 4.

[0019] In some embodiments, the amino acid sequence of the engineered oxalate decarboxylase polypeptide comprises at least a substitution or substitution set at amino acid position(s) 13/17/196, 17/212/331, 17/26/196/212/226, 17/26/196/212/226/331, 13/17/26/196/331, 17/60/196/226, 17/46/212, 26/60/196/226/331, 17/46/196/212/274/331, 212, 17/196/226, 13/17/26/212/331, 13/17/212/226/331, 196/212/331, 13/17/196/331, 13/17/26/212/226/331, 17/60/196/212/226/331, 13/17/212, 13/17/26/331, 13/17, 13/17/26/196, 46/196/212/226, 17/60/196, 17/196/331, 13/17/46/226/331, 17/196/226/331, 17/46/196/212/331, 17/46/212/331, 17/196, 13/17/212/226, 17/212, 17/26/212, 13/17/226/331, 17/196/212/331, 17/196/212/226/331, 13/17/26/226/331, 46/60/196/226/331, 17/46/196/331, 13/17/46/196, 196/212, 13/17/26, 17/83/263, 17/83/173/227, 17/227/301, 17/83/227/263, 17/83/125, 17/83/173, 17/263/301, 17/125, 17/83/301, 17/173, 17/83/227, 17/227, 17, 17/125/227, 17/83, 128, 76, 141, 110, 79, 117, or 61, wherein the amino acid positions are relative to the reference sequence corresponding to SEQ ID NO: 2 or 4.

[0020] In some embodiments, the amino acid sequence of the engineered oxalate decarboxylase polypeptide comprises at least a substitution or substitution set at amino acid position(s) 13/17/79, 13/14/17/60/79, 13/17/79/83, 13/17/79/301, 13/14/17/60/79/212, 17/60/197, 13/60/212, 13/14/17/60/79/83/301, 13/17/60/79, 17/60/301, 14/17/79, 17/60/83, 17/79, 13/17/60/79/83/301, 342, 52/190, 94/190, 190/342/351, 13/79, 13/96, 273, 126, 96, 79, 269, 40, 44, 267, 266, 160, 277, 149, 22, 234, 54, 297, 106, or 13/43, wherein the amino acid positions are relative to the reference sequence corresponding to SEQ ID NO: 2 or 4.

[0021] In some embodiments, the amino acid sequence of the engineered oxalate decarboxylase polypeptide comprises at least a substitution at amino acid position 37, 125, 162, 94, 195, 85, 103, 232, 189, 186, 155, 193, 342, 196, 63, 33, 351, 314, 187, 303, 164, 153, 346, 183, 19, 123, 350, 205,284, 199, 343, 200, 208, 169, 190, or 121, or combinations thereof, wherein the amino acid positions are relative to the reference sequence corresponding to SEQ ID NO: 2 or 4.

[0022] In some embodiments, the amino acid sequence of the engineered oxalate decarboxylase polypeptide comprises at least a substitution or substitution set at amino acid position(s) 14/26/60/318, 14/26/60/94/162/212, 60/162/226, 60, 14/125/162/212/318, 60/125/226, 14/125/162/226, 26/60/162/226/318, 14/26/94/162/212/226, 14/60/162, 14/60/162/226, 14/94/162/318, 14/94/162, 14/60/226, 14/60/94/212, 14/60/162/212, 14/162, 14/94/212/318, 14/60, 14/26/162, 14, 14/318, 14/162/226/318, 14/125/212, 14/125/226/318, 14/26/60/162, 14/125/162/212/226, 14/94/125/162/318, 14/125/226, 277, 166, 233, 83, 5, 342, 96, 284, or 26, wherein the amino acid positions are relative to the reference sequence corresponding to SEQ ID NO: 2 or 4.

[0023] In some embodiments, the amino acid sequence of the engineered oxalate decarboxylase polypeptide comprises at least a substitution or substitution set at amino acid position(s) 5/26/83/342, 5/26/277, 5/96/277, 5/83/277/342, 26/83/277, 5/26/83/277, 5/277/342, 5/26/166/277, 83/277/342, 83/96/277/342, 83/96/277, 26/83/277/342, 5/26/83/277/342, 5/83/277, 26/277, 83/277, 5/35/277, 5/26/83/96/277, 5/26/96/277, 5/277, 5/166/277, 26/83/96/277/342, 277, 26/277/342, 5, or 5/83/96/277/342, wherein the amino acid positions are relative to the reference sequence corresponding to SEQ ID NO: 2 or 4.

[0024] In some embodiments, the amino acid sequence of the engineered oxalate decarboxylase polypeptide comprises at least a substitution at amino acid position 26, 31, 96, 60, 318, 210, 277, 37, 16, 195, 79, 17, 13, 83, 162, or 174, or combinations thereof, wherein the amino acid positions are relative to the reference sequence corresponding to SEQ ID NO: 2 or 4.

[0025] In some embodiments, the amino acid sequence of the engineered oxalate decarboxylase polypeptide comprises at least a substitution or substitution set at amino acid position(s) 174/318, 26/96, 60/318, 31/318, 162/174/318, 174/277/318, 26/195/318, 60/162/195, 60/162/318, 174/195/277, 16/17/174, 60/195/277, 37/277/318, 16/162/195/277, 26/79/83/162, 26/31/60/318, 16/174/195/277, 13/37/83/162, 16/17/60/195, 13/17/37/83, 31/37/162/174/318, 13/16/31/83/162, 16/60/174/195/318, 17/60/96/162/195/277, 13/26/60/83/162/174, 17/31/60/162/174/277, 16/17/26/83/96/277, 17/26/37/174/277/318, 13/16/31/60/162/174, 13/17/31/83/277/318, 13/16/17/31/83/162/318, 13/16/60/83/162/195/318, 13/16/17/31/37/83/96/162, 13/17/26/37/60/83/162/210/318, 13/16/26/31/83/96/162/174/318, 13/16/17/31/60/83/96/162/174/195/318, 13/16/26/37/60/83/162/174/195/210/318, 13/16/37/79/83/96/162/174/195/210/277, 13/17/26/31/37/60/79/83/96/162/174/210, 13/16/17/26/37/79/83/96/174/195/210/318, 13/26/31/37/60/83/96/162/174/195/210/277/318, 13/16/17/31/37/60/79/83/96/162/174/195/210/318, 13/16/17/31/60/79/83/96/162/174/195/210/277/318, 13/16/17/26/37/60/79/96/162/174/195/210/277/318, 13/26/31/37/60/79/83/96/162/174/195/210/277/318, 13/16/17/26/31/37/60/96/162/174/195/210/277/318, 13/16/17/26/31/37/79/83/96/162/174/195/210/318, 13/16/17/26/31/37/60/79/96/162/174/210/277/318, 13/17/26/31/37/60/79/83/96/162/174/195/210/277/318, 13/16/26/31/37/60/79/83/96/162/174/195/210/277/318, 16/17/26/31/37/60/79/83/96/162/174/195/210/277/318, or 13/16/17/26/31/37/60/79/83/96/162/174/195/210/277/318, wherein the amino acid positions are relative to the reference sequence corresponding to SEQ ID NO: 2 or 4.

[0026] In some embodiments, the amino acid sequence of the engineered oxalate decarboxylase polypeptide comprises at least a substitution or substitution set of an engineered oxalate decarboxylase polypeptide set forth in Tables 4-1, 4-2, 4-3, 4-4, 4-5, 4-6, 4-7, 5-1, and 5-2, wherein the amino acid positions are relative to SEQ ID NO: 2 or 4.

[0027] In some embodiments, the engineered oxalate decarboxylase polypeptide comprises an amino acid sequence having at least 70%, 75%, 80%, 81%, 82%, 83%, 84%, 85%, 86%, 87%, 88%, 89%, 90%, 91%, 92%, 93%, 94%, 95%, 96%, 97%, 98%, 99%, or more sequence identity to a reference sequence corresponding to SEQ ID NO: 172, 320, 396, 616, 670, 750, or 906, or to a reference sequence corresponding to residues 1-359 of SEQ ID NO: 172, 320, or 396.

[0028] In some embodiments, the engineered oxalate decarboxylase polypeptide comprises an amino acid sequence having at least 70%, 75%, 80%, 81%, 82%, 83%, 84%, 85%, 86%, 87%, 88%, 89%, 90%, 91%, 92%, 93%, 94%, 95%, 96%, 97%, 98%, 99%, or more sequence identity to a reference sequence corresponding to residues 1-359 of an even-numbered SEQ ID NO. of SEQ ID NOs: 28-614, a reference sequence corresponding to an even-numbered SEQ ID NO. of SEQ ID NOs: 28-614, or a reference sequence corresponding to an even-numbered SEQ ID NO. of SEQ ID NOs: 616-1622.

[0029] In some embodiments, the engineered oxalate decarboxylase polypeptide comprises an amino acid sequence having at least 70%, 75%, 80%, 81%, 82%, 83%, 84%, 85%, 86%, 87%, 88%, 89%, 90%, 91%, 92%, 93%, 94%, 95%, 96%, 97%, 98%, 99%, or more sequence identity to a reference sequence corresponding to an even-numbered SEQ ID NO. of SEQ ID NOs: 28-1622, or to the reference sequence corresponding to residues 1-359 of an even-numbered SEQ ID NO. of SEQ ID NOs: 28-614, wherein the amino acid sequence comprises one or more substitutions relative to the reference sequence corresponding to SEQ ID NO: 172, 320, 396, 616, 670, 750, or 906, or relative to the reference sequence corresponding to residues 1-359 of SEQ ID NO: 172, 320, or 396.

[0030] In some embodiments, the engineered oxalate decarboxylase polypeptide comprises an amino acid sequence having at least 70%, 75%, 80%, 81%, 82%, 83%, 84%, 85%, 86%, 87%, 88%, 89%, 90%, 91%, 92%, 93%, 94%, 95%, 96%, 97%, 98%, 99%, or more sequence identity to a reference sequence corresponding to SEQ ID NO: 172, 320, 396, 616, 670, 750, or 906, or to a reference sequence corresponding to residues 1-359 of SEQ ID NO: 172, 320, or 396, wherein the amino acid sequence comprises one or more substitutions relative to the reference sequence corresponding to SEQ ID NO: 172, 320, 396, 616, 670, 750, or 906, or relative to the reference sequence corresponding to residues 1-359 of SEQ ID NO: 172, 320, or 396.

[0031] In some embodiments, the amino acid sequence of the engineered oxalate decarboxylase polypeptide comprises at least a substitution at amino acid position 4, 5, 6, 7, 10, 11, 13, 14, 16, 17, 18, 19, 22, 26, 31, 33, 35, 37, 40, 43, 44, 46, 52, 54, 60, 61, 62, 63, 76, 79, 80, 82, 83, 85, 94, 96, 97, 103, 104, 106, 110, 117, 121, 123, 124, 125, 126, 128, 141, 149, 153, 155, 156, 160, 162, 164, 166, 169, 173, 174, 176, 180, 182, 183, 186, 187, 188, 189, 190, 193, 195, 196, 197, 199, 200, 205, 206, 208, 210, 212, 216, 219, 226, 227, 232, 233, 234, 240, 242, 243, 263, 265, 266, 267, 269, 270, 273, 274, 277, 284, 297, 301, 303, 304, 314, 316, 318, 331, 335, 339, 342, 343, 346, 347, 350, 351, 356, or 359, or combinations thereof, wherein the amino acid positions are relative to the reference sequence corresponding to residues SEQ ID NO: 172, 320, 396, 616, 670, 750, or 906, or relative to the reference sequence corresponding to residues 1-359 of SEQ ID NO: 172, 320, or 396.

[0032] In some embodiments, the amino acid sequence of the engineered oxalate decarboxylase polypeptide comprises at least a substitution at amino acid position 13, 14, 16, 17, 26, 31, 37, 60, 79, 83, 96, 162, 174, 195, 196, 210, 226, 277, 301, or 318, or combinations thereof, wherein the amino acid positions are relative to the reference sequence corresponding to SEQ ID NO: 172, 320, 396, 616, 670, 750, or 906, or relative to the reference sequence corresponding to residues 1-359 of SEQ ID NO: 172, 320, or 396.

[0033] In some embodiments, the engineered oxalate decarboxylase polypeptide comprises an amino acid sequence having at least 70%, 75%, 80%, 81%, 82%, 83%, 84%, 85%, 86%, 87%, 88%, 89%, 90%, 91%, 92%, 93%, 94%, 95%, 96%, 97%, 98%, 99%, or more sequence identity to the reference sequence corresponding to residues 1-359 of SEQ ID NO: 172, or to the reference sequence corresponding to SEQ ID NO: 172, wherein the amino acid sequence comprises one or more amino acid substitutions relative to the reference sequence corresponding to residues 1-359 of SEQ ID NO: 172, or relative to the reference sequence corresponding SEQ ID NO: 172.

[0034] In some embodiments, the amino acid sequence of the engineered oxalate decarboxylase polypeptide comprises at least a substitution or substitution set at amino acid position(s) 13, 212, 124/196/210/226, 5, 16/26/124/155/195/210/284, 196/226, 16/155/195/210/226, 16/195/210/226, 16/155/174/196, 16/195/226, 318, 16/195/196/210, 16/26/124/155/174/196/210, 195/210, 26/155/174/210, 316, 60, 16/155/174, 16/124/174/196, 16/226, 16/26/174/196/226, 17, 331, 124/195, 16/174/196, 188, 195/196/210, 174/196/210, 16/26/155/174, 16/155/195/196/226, 195/226/284, 16, 240, 16/26/124/155/195/196/226, 183/232/339/343, 183/206, 63, 173/347, 16/26/174/196, 16/284, 46, 16/124/195/196, 274, 174/196, 155/174/196, 174/196/226, 16/124/155/174/195, 16/26/155/174/196, 26/174/196/210/284, 16/195/196/284, 174, 16/124/174/195/210/226/284, 16/174/195/284, 26/174/196/210/226/284, 174/196/226/284, 124/174/196, 26/174/195/210/226, 162, 16/124/195/196/284, 206/343, 16/195/196, 16/26/174/195/196/210/226, 155/195/196/226, 18, 335, 124/155/174/195/226, 26/155/174/195/226, 195/196, 153, 155/174/195, 174/195/210/284, 174/195, 37, 124/174/195/226/284, 176, 16/155/174/195/196/226/284, 10, 169/173, 155, 33, 173/183/343/347, 104/265, or 233, wherein the amino acid positions are relative to the reference sequence corresponding to residues 1-359 of SEQ ID NO: 172, or relative to the reference sequence corresponding SEQ ID NO: 172.

[0035] In some embodiments, the engineered oxalate decarboxylase polypeptide comprises an amino acid sequence having at least 70%, 75%, 80%, 81%, 82%, 83%, 84%, 85%, 86%, 87%, 88%, 89%, 90%, 91%, 92%, 93%, 94%, 95%, 96%, 97%, 98%, 99%, or more sequence identity to a reference sequence corresponding to residues 1-359 of SEQ ID NO: 320, or to the reference sequence corresponding to SEQ ID NO: 320, wherein the amino acid sequence comprises one or more amino acid substitutions relative to the reference sequence corresponding to residues 1-359 of SEQ ID NO: 320, or relative to the reference sequence corresponding to SEQ ID NO: 320.

[0036] In some embodiments, the amino acid sequence of the engineered oxalate decarboxylase polypeptide comprises at least a substitution or substitution set at amino acid position(s) 13/17/196, 17/212/331, 17/26/196/212/226, 17/26/196/212/226/331, 13/17/26/196/331, 17/60/196/226, 17/46/212, 26/60/196/226/331, 17/46/196/212/274/331, 212, 17/196/226, 13/17/26/212/331, 13/17/212/226/331, 196/212/331, 13/17/196/331, 13/17/26/212/226/331, 17/60/196/212/226/331, 13/17/212, 13/17/26/331, 13/17, 13/17/26/196, 46/196/212/226, 17/60/196, 17/196/331, 13/17/46/226/331, 17/196/226/331, 17/46/196/212/331, 17/46/212/331, 17/196, 13/17/212/226, 17/212, 17/26/212, 13/17/226/331, 17/196/212/331, 17/196/212/226/331, 13/17/26/226/331, 46/60/196/226/331, 17/46/196/331, 13/17/46/196, 196/212, 13/17/26, 17/83/263, 17/83/173/227, 17/227/301, 17/83/227/263, 17/83/125, 17/83/173, 17/263/301, 17/125, 17/83/301, 17/173, 17/83/227, 17/227, 17, 17/125/227, 17/83, 128, 76, 141, 110, 79, 117, or 61, wherein the amino acid positions are relative to the reference sequence corresponding to residues 1-359 of SEQ ID NO: 320, or relative to the reference sequence corresponding to SEQ ID NO: 320.

[0037] In some embodiments, the engineered oxalate decarboxylase polypeptide comprises an amino acid sequence having at least 70%, 75%, 80%, 81%, 82%, 83%, 84%, 85%, 86%, 87%, 88%, 89%, 90%, 91%, 92%, 93%, 94%, 95%, 96%, 97%, 98%, 99%, or more sequence identity to a reference sequence corresponding to sequence of residues 1-359 of SEQ ID NO: 396, or to the reference sequence corresponding to SEQ ID NO::396, wherein the amino acid sequence comprises one or more amino acid substitutions relative to the reference sequence corresponding to residues 1-359 of SEQ ID NO: 396, or relative to the reference sequence corresponding to SEQ ID NO::396.

[0038] In some embodiments, the amino acid sequence of the engineered oxalate decarboxylase polypeptide comprises at least a substitution or substitution set at amino acid position(s) 13/17/79, 13/14/17/60/79, 13/17/79/83, 13/17/79/301, 13/14/17/60/79/212, 17/60/197, 13/60/212, 13/14/17/60/79/83/301, 13/17/60/79, 17/60/301, 14/17/79, 17/60/83, 17/79, 13/17/60/79/83/301, 342, 52/190, 94/190, 190/342/351, 13/79, 13/96, 273, 126, 96, 79, 269, 40, 44, 267, 266, 160, 277, 149, 22, 234, 54, 297, 106, or 13/43, wherein the amino acid positions are relative to the reference sequence corresponding to residues 1-359 of SEQ ID NO: 396, or relative to the reference sequence corresponding to SEQ ID NO: 396.

[0039] In some embodiments, the engineered oxalate decarboxylase polypeptide comprises an amino acid sequence having at least 70%, 75%, 80%, 85%, 86%, 87%, 88%, 89%, 90%, 91%, 92%, 93%, 94%, 95%, 96%, 97%, 98%, 99%, or more sequence identity to the reference sequence corresponding to SEQ ID NO: 670, wherein the amino acid sequence comprises one or more amino acid substitutions relative to the reference sequence corresponding to SEQ ID NO: 670.

[0040] In some embodiments, the amino acid sequence of the engineered oxalate decarboxylase polypeptide comprises at least a substitution at amino acid position 37, 125, 162, 94, 195, 85, 103, 232, 189, 186, 155, 193, 342, 196, 63, 33, 351, 314, 187, 303, 164, 153, 346, 183, 19, 123, 350, 205, 284, 199, 343, 200, 208, 169, 190, or 121, or combinations thereof, wherein the amino acid positions are relative to the reference sequence corresponding to SEQ ID NO: 670.

[0041] In some embodiments, the engineered oxalate decarboxylase polypeptide comprises an amino acid sequence having at least 70%, 75%, 80%, 81%, 82%, 83%, 84%, 85%, 86%, 87%, 88%, 89%, 90%, 91%, 92%, 93%, 94%, 95%, 96%, 97%, 98%, 99%, or more sequence identity to the reference sequence corresponding to SEQ ID NO: 616, wherein the amino acid sequence comprises one or more amino acid substitutions relative to the reference sequence corresponding to SEQ ID NO: 616.

[0042] In some embodiments, the amino acid sequence of the engineered oxalate decarboxylase polypeptide comprises at least a substitution or substitution set at amino acid position(s) 14/26/60/318, 14/26/60/94/162/212, 60/162/226, 60, 14/125/162/212/318, 60/125/226, 14/125/162/226, 26/60/162/226/318, 14/26/94/162/212/226, 14/60/162, 14/60/162/226, 14/94/162/318, 14/94/162, 14/60/226, 14/60/94/212, 14/60/162/212, 14/162, 14/94/212/318, 14/60, 14/26/162, 14, 14/318, 14/162/226/318, 14/125/212, 14/125/226/318, 14/26/60/162, 14/125/162/212/226, 14/94/125/162/318, 14/125/226, 277, 166, 233, 83, 5, 342, 96, 284, or 26, wherein the amino acid positions are relative to the reference sequence corresponding SEQ ID NO: 616.

[0043] In some embodiments, the engineered oxalate decarboxylase polypeptide comprises an amino acid sequence having at least 70%, 75%, 80%, 81%, 82%, 83%, 84%, 85%, 86%, 87%, 88%, 89%, 90%, 91%, 92%, 93%, 94%, 95%, 96%, 97%, 98%, 99%, or more sequence identity to the reference sequence corresponding to SEQ ID NO: 750, wherein the amino acid sequence comprises one or more amino acid substitutions relative to the reference sequence corresponding to SEQ ID NO: 750.

[0044] In some embodiments, the amino acid sequence of the engineered oxalate decarboxylase polypeptide comprises at least a substitution or substitution set at amino acid position(s) 5/26/83/342, 5/26/277, 5/96/277, 5/83/277/342, 26/83/277, 5/26/83/277, 5/277/342, 5/26/166/277, 83/277/342, 83/96/277/342, 83/96/277, 26/83/277/342, 5/26/83/277/342, 5/83/277, 26/277, 83/277, 5/35/277, 5/26/83/96/277, 5/26/96/277, 5/277, 5/166/277, 26/83/96/277/342, 277, 26/277/342, 5, or 5/83/96/277/342, wherein the amino acid positions are relative to the reference sequence corresponding to SEQ ID NO: 750.

[0045] In some embodiments, the engineered oxalate decarboxylase polypeptide comprises an amino acid sequence having at least 70%, 75%, 80%, 81%, 82%, 83%, 84%, 85%, 86%, 87%, 88%, 89%, 90%, 91%, 92%, 93%, 94%, 95%, 96%, 97%, 98%, 99%, or more sequence identity to a reference sequence corresponding to SEQ ID NO: 906, wherein the amino acid sequence comprises one or more amino acid substitutions relative to the reference sequence corresponding to SEQ ID NO: 906.

[0046] In some embodiments, the amino acid sequence of the engineered oxalate decarboxylase polypeptide comprises at least a substitution at amino acid position 26, 31, 96, 60, 318, 210, 277, 37, 16, 195, 79, 17, 13, 83, 162, or 174, or combinations thereof, wherein the amino acid positions are relative to the reference sequence corresponding to SEQ ID NO: 906.

[0047] In some embodiments, the amino acid sequence of the engineered oxalate decarboxylase polypeptide comprises at least a substitution or substitution set at amino acid position(s) 174/318, 26/96, 60/318, 31/318, 162/174/318, 174/277/318, 26/195/318, 60/162/195, 60/162/318, 174/195/277, 16/17/174, 60/195/277, 37/277/318, 16/162/195/277, 26/79/83/162, 26/31/60/318, 16/174/195/277, 13/37/83/162, 16/17/60/195, 13/17/37/83, 31/37/162/174/318, 13/16/31/83/162, 16/60/174/195/318, 17/60/96/162/195/277, 13/26/60/83/162/174, 17/31/60/162/174/277, 16/17/26/83/96/277, 17/26/37/174/277/318, 13/16/31/60/162/174, 13/17/31/83/277/318, 13/16/17/3⅛3/162/318, 13/16/60/83/162/195/318, 13/16/17/31/37/83/96/162, 13/17/26/37/60/83/162/210/318, 13/16/26/31/83/96/162/174/318, 13/16/17/31/60/83/96/162/174/195/318, 13/16/26/37/60/83/162/174/195/210/318, 13/16/37/79/83/96/162/174/195/210/277, 13/17/26/31/37/60/79/83/96/162/174/210, 13/16/17/26/37/79/83/96/174/195/210/318, 13/26/31/37/60/83/96/162/174/195/210/277/318, 13/16/17/31/37/60/79/83/96/162/174/195/210/318, 13/16/17/31/60/79/83/96/162/174/195/210/277/318, 13/16/17/26/37/60/79/96/162/174/195/210/277/318, 13/26/31/37/60/79/83/96/162/174/195/210/277/318, 13/16/17/26/31/37/60/96/162/174/195/210/277/318, 13/16/17/26/31/37/79/83/96/162/174/195/210/318, 13/16/17/26/31/37/60/79/96/162/174/210/277/318, 13/17/26/31/37/60/79/83/96/162/174/195/210/277/318, 13/16/26/31/37/60/79/83/96/162/174/195/210/277/318, 16/17/26/31/37/60/79/83/96/162/174/195/210/277/318, or 13/16/17/26/31/37/60/79/83/96/162/174/195/210/277/318, wherein the amino acid positions are relative to the reference sequence corresponding to SEQ ID NO: 906.

[0048] In some embodiments, the amino acid sequence of the engineered oxalate decarboxylase polypeptide comprises at least a substitution or substitution set of an oxalate decarboxylase polypeptide set forth in Tables 4-1, 4-2, 4-3, 4-4, 4-5, 4-6, 4-7, 5-1, and 5-2, wherein the amino acid positions are relative to the reference sequence corresponding to SEQ ID NO: 172, 320, 396, 616, 670, 750, or 906, or relative to the reference sequence corresponding to residues 1-359 of SEQ ID NO: 172, 320, or 396.

[0049] In some embodiments, the amino acid sequence of the engineered oxalate decarboxylase polypeptide comprises an amino acid sequence of an engineered oxalate decarboxylase polypeptide set forth in Tables 4-1, 4-2, 4-3, 4-4, 4-5, 4-6, 4-7, 5-1, and 5-2.

[0050] In some embodiments, the engineered oxalate decarboxylase polypeptide comprises an amino acid sequence comprising SEQ ID NO: 4; an amino acid sequence comprising residues 1-359 of an even-numbered SEQ ID NO. of SEQ ID NOs: 28-614; an amino acid sequence comprising an even-numbered SEQ ID NO. of SEQ ID NOs: 28-614; or an amino acid sequence comprising an even-numbered SEQ ID NO. of SEQ ID NOs: 616-1622, optionally wherein the amino acid sequence includes 1, 2, 3, 4, 5, 6, 7, 8, 9, or up to 10 amino acid substitutions.

[0051] In some embodiments, the amino acid sequence of the engineered oxalate decarboxylase polypeptide comprises residues 1-359 of SEQ ID NO: 172, 320, or 396, or comprises SEQ ID NO: 172, 320, 396, 616, 670, 750, or 906, optionally wherein the amino acid sequence includes 1, 2, 3, 4, 5, 6, 7, 8, 9, or up to 10 substitutions.

[0052] In some embodiments of the foregoing, the amino acid sequence of the engineered oxalate decarboxylase polypeptide includes 1, 2, 3, 4, or 5 substitutions.

[0053] In some embodiments, the engineered oxalate decarboxylase polypeptide of the present disclosure has oxalate decarboxylase activity and exhibits one or more improved enzyme properties compared to a reference oxalate decarboxylase having an amino acid sequence corresponding to SEQ ID NO: 2, 4, 172, 320, 396, 616, 670, 750, or 906, or an amino acid sequence corresponding to residues 1-359 of SEQ ID NO: 172, 320, or 396. In some embodiments, the improved property of the engineered oxalate decarboxylase polypeptide is selected from (a) increased activity on oxalate, (b) increased thermal stability, (c) increased stability at acidic pH, (d) increased activity at acidic pH, (e) increased activity at neutral pH, (f) increased expression, (g) increased solubility, and (h) increased resistance to proteolysis, or any combination of (a), (b), (c), (d), (e), (f), (g) and (h), compared to a reference oxalate decarboxylase having an amino acid sequence corresponding to SEQ ID NO: 2, 4, 172, 320, 396, 616, 670, 750, or 906, or an amino acid sequence corresponding to residues 1-359 of SEQ ID NO: 172, 320, or 396. Exemplary improved propertied are provided in the Examples and Tables 4-1, 4-2, 4-3, 4-4, 4-5, 4-6, 4-7, 5-1, and 5-2,

[0054] In some embodiments, the reference oxalate decarboxylase polypeptide for comparison of the improved property is the oxalate decarboxylase polypeptide having an amino acid sequence corresponding to SEQ ID NO: 2 or 4. In some embodiments the reference oxalate decarboxylase polypeptide is the wild-type oxalate decarboxylase of Gemmata sp. SH-PL17.

[0055] In some embodiments, an engineered oxalate decarboxylase polypeptide comprises an amino acid sequence having at least 70%, 75%, 80%, 81%, 82%, 83%, 84%, 85%, 86%, 87%, 88%, 89%, 90%, 91%, 92%, 93%, 94%, 95%, 96%, 97%, 98%, 99%, or more sequence identity to a reference sequence corresponding to SEQ ID NO: 4, 6, 8, 10, 12, 14, 16, 18, 20, 22, 24, or 26, or the reference sequence corresponding to residues 1-424 of SEQ ID NO: 6.

[0056] In some embodiments, an engineered oxalate decarboxylase polypeptide comprises an amino acid sequence having at least 70%, 75%, 80%, 81%, 82%, 83%, 84%, 85%, 86%, 87%, 88%, 89%, 90%, 91%, 92%, 93%, 94%, 95%, 96%, 97%, 98%, 99%, or more sequence identity to a reference amino acid sequence corresponding to SEQ ID NO: 4, 6, 8, 10, 12, 14, 16, 18, 20, 22, 24, or 26, or to a reference amino acid sequence corresponding to residues 1-424 of SEQ ID NO: 6, wherein the amino acid sequence comprises one or more substitutions in its amino acid sequence.

[0057] In some embodiments, the engineered oxalate decarboxylase polypeptide comprises an amino acid sequence comprising SEQ ID NO: 2, 4, 6, 8, 10, 12, 14, 16, 18, 20, 22, 24, or 26, or an amino acid comprising residues 1-424 of SEQ ID NO: 6. In some embodiments, the oxalate decarboxylase polypeptides are provided as compositions, particularly pharmaceutical compositions.

[0058] In some embodiments, the engineered oxalate decarboxylase polypeptide described herein is purified or is a purified preparation.

[0059] In another aspect, the present disclosure provides compositions comprising at least one engineered oxalate decarboxylase polypeptide provided herein. In some embodiments, the composition is a pharmaceutical composition comprising at least one engineered oxalate decarboxylase of the present disclosure, and a pharmaceutically acceptable excipient or carrier.

[0060] In a further aspect, the present disclosure provides a recombinant polynucleotide comprising a polynucleotide sequence encoding an engineered oxalate decarboxylase polypeptide described herein.

[0061] In some embodiments, the recombinant polynucleotide comprises a polynucleotide sequence having at least 70%, 75%, 80%, 81%, 82%, 83%, 84%, 85%, 86%, 87%, 88%, 89%, 90%, 91%, 92%, 93%, 94%, 95%, 96%, 97%, 98%, 99%, or more sequence identity to a reference polynucleotide sequence corresponding to SEQ ID NO: 3, a reference polynucleotide sequence corresponding to nucleotide residues 1-1077 of an odd-numbered SEQ ID NO. of SEQ ID NOs: 27-613, a reference polynucleotide sequence corresponding to an odd-numbered SEQ ID NO. of SEQ ID NOs: 27-613, or a reference polynucleotide sequence corresponding to an odd-numbered SEQ ID NO. of SEQ ID NOs: 615-1621, wherein the recombinant polynucleotide encodes an engineered oxalate decarboxylase polypeptide.

[0062] In some embodiments, the recombinant polynucleotide comprises a polynucleotide sequence having at least 70%, 75%, 80%, 81%, 82%, 83%, 84%, 85%, 86%, 87%, 88%, 89%, 90%, 91%, 92%, 93%, 94%, 95%, 96%, 97%, 98%, 99%, or more sequence identity to a reference polynucleotide sequence corresponding to SEQ ID NO: 33, 171, 319, 395, 615, 669, 749, or 905, or to a reference polynucleotide sequence corresponding to nucleotide residues 1-1077 of SEQ ID NO: 171, 319, or 395, wherein the recombinant polynucleotide encodes an engineered oxalate decarboxylase polypeptide.

[0063] In some embodiments, the recombinant polynucleotide comprises a polynucleotide sequence which is codon-optimized. In some embodiments, the polynucleotide sequence is codon optimized for expression in a bacterial cell, fungal cell, or mammalian cell.

[0064] In some embodiments, the recombinant polynucleotide comprises a polynucleotide sequence comprising SEQ ID NO: 1 or 3; a polynucleotide sequence comprising nucleotide residues 1-1077 of an odd-numbered SEQ ID NO. of SEQ ID NOs: 27-613; a polynucleotide sequence comprising an odd-numbered SEQ ID NO. of SEQ ID NOs: 27-613; or a polynucleotide sequence comprising an odd-numbered SEQ ID NO. of SEQ ID NOs: 615-1621.

[0065] In some embodiments, the recombinant polynucleotide comprises a polynucleotide sequence comprising SEQ ID NO: 3, 171, 319, 395, 615, 669, 749, or 905, or comprising nucleotide residues 1-1077 of SEQ ID NO: 171, 319, or 395.

[0066] In another aspect, the present disclosure also provides an expression vector comprising a recombinant polynucleotide encoding an engineered oxalate decarboxylase polypeptide. In some embodiments, the expression vectors further comprise at least one control sequence operably linked to the recombinant polynucleotide. In some embodiments, the control sequence comprises a promoter. In some further embodiments, the promoter is a heterologous promoter.

[0067] In a further aspect, the present disclosure also provides host cells transformed with at least one recombinant polynucleotide or an expression vector described herein. In some embodiments, the host cell comprises a recombinant polynucleotide described herein. In some embodiments, the host cell comprises an expression vector described herein. In some embodiments, the host cell is a prokaryotic cell or a eukaryotic cell.

[0068] In another aspect, the present disclosure also provides a method of producing an engineered oxalate decarboxylase polypeptide described herein, the method comprising culturing a host cell comprising a recombinant polynucleotide encoding an engineered oxalate decarboxylase polypeptide under suitable culture conditions such that the encoded engineered oxalate decarboxylase polypeptide is produced. In some embodiments, the method further comprises recovering the engineered oxalate decarboxylase polypeptide from the culture and/or host cells. In some embodiments, the methods further comprise a step of purifying the expressed engineered oxalate decarboxylase polypeptide.

[0069] In another aspect, the present disclosure provides a composition comprising an engineered oxalated decarboxylase described herein. In some embodiments, the composition is a pharmaceutical composition. In some embodiments, the pharmaceutical composition comprises an engineered oxalate decarboxylase, and a pharmaceutically acceptable carrier or excipient.

[0070] In another aspect, the engineered oxalate decarboxylase is applied to various therapeutic and industrial uses. In some embodiments, an engineered oxalate decarboxylase is used for reducing levels of oxalate in a subject. In some embodiments, a method for reducing levels of oxalate in a subject comprises administering an effective amount of an engineered oxalate decarboxylase described herein to a subject in need thereof to reduce levels of oxalate in the subject. In some embodiments, the method is used to reduce levels of oxalate in urine and/or plasma of the subject.

[0071] In some embodiments, the engineered oxalate decarboxylase is used for treating hyperoxaluria and/or preventing the symptoms of hyperoxaluria in a subject, the method comprising administering to a subject with hyperoxaluria an effective amount of an engineered oxalate decarboxylase or a composition thereof described herein. In some embodiments, the subject is treated to ameliorate one or more symptoms of hyperoxaluria. In some embodiments, the levels of oxalate in the urine and/or plasma is reduced. In some embodiments, the subject can eat a diet that is less restricted in oxalate content than diets required by subjects who are afflicted with hyperoxaluria or have pathogenically elevated levels of oxalate. In some embodiments, the subject is an infant, child, young adult, or adult.

[0072] In another aspect, the present disclosure provides use of the engineered oxalate decarboxylase, or a pharmaceutical composition thereof, for the treatment of a disorder or condition associated with elevated levels of oxalate. In some embodiments, the use of the engineered oxalate decarboxylase is for the preparation of a medicament for treating a disease or condition associated with elevated levels of oxalate. In some embodiments, the use is in the treatment of hyperoxaluria.

[0073] In another aspect, the engineered oxalate decarboxylase can be useful in industrial applications, such as for reducing formation of calcium oxalate deposits/precipitates. Deposits or precipitates of calcium oxalate are problematic in pulp and paper industries, including removal of oxalate from industrial wastewater.

### BRIEF DESCRIPTION OF THE DRAWINGS

[0074] FIG. 1 shows a graph of percent change in Uox values for individual animals in three treatment groups orally administered different doses of an engineered oxalate decarboxylase (SEQ ID NO: 906). Bars represent the % change in UOx from HOD to HOD + Treatment (HOD: high oxalate diet). Dotted line at -20% (y-axis) identifies the minimum threshold reduction value used to evaluate efficacy of treatment.

[0075] FIG. 2 shows a graph of change in UOx (mg/24 hr) by treatment group. The white bars represent groups receiving HOD, and patterned bars represent groups receiving HOD + Tx. Treatment groups received the engineered oxalate decarboxylase (SEQ ID NO: 906) dosed at 5,139 U, 10,122 U, or 41,029 U. Statistical significance between HOD and HOD + Tx was determined using a One-way ANOVA in GraphPad Prism 9.

### DETAILED DESCRIPTION

[0076] The present disclosure provides engineered oxalate decarboxylase (ODC) polypeptides and compositions thereof; polynucleotides encoding the engineered oxalate decarboxylase polypeptides; and uses of the engineered oxalate decarboxylase polypeptide for therapeutic and industrial purposes. In some embodiments, the oxalate decarboxylase polypeptides are engineered to have improved properties, including, among others, improved catalytic activity, reduced sensitivity to proteolysis, and/or increased tolerance to and stability at low pH environments.

### Abbreviations and Definitions

[0077] Unless defined otherwise, all technical and scientific terms used herein generally have the same meaning as commonly understood by one of ordinary skill in the art to which this invention pertains. It is also to be understood that the invention herein is not limited to the particular methodology, protocols, and reagents described, as these may vary, depending upon the context they are used by those of skill in the art.

[0078] Furthermore, the headings provided herein are not limitations of the various aspects or embodiments of the invention which can be had by reference to the application as a whole. Accordingly, the terms defined immediately below are more fully defined by reference to the application as a whole.

[0079] As used herein, the singular “a”, “an,” and “the” include the plural references, unless the context clearly indicates otherwise.

[0080] Numeric ranges are inclusive of the numbers defining the range. Thus, every numerical range disclosed herein is intended to encompass every narrower numerical range that falls within such broader numerical range, as if such narrower numerical ranges were all expressly written herein. It is also intended that every maximum (or minimum) numerical limitation disclosed herein includes every lower (or higher) numerical limitation, as if such lower (or higher) numerical limitations were expressly written herein.

[0081] The term “about” means an acceptable error for a particular value. In some instances, “about” means within 0.05%, 0.5%, 1.0%, or 2.0%, of a given value range. In some instances, “about” means within 1, 2, 3, or 4 standard deviations of a given value.

[0082] As used herein, the term “comprising” and its cognates are used in their inclusive sense (i.e., equivalent to the term “including” and its corresponding cognates).

[0083] It is to be further understood that where description of embodiments use the term “comprising” and its cognates, the embodiments can also be described using language “consisting essentially of” or “consisting of.”

[0084] As used herein, the term “at least one” or “at least a” is not intended to limit the invention to any particular number of items. It is intended to encompass one, two, three, four, five, six, seven, eight, nine, ten, or more items, as desired.

[0085] “EC” number refers to the Enzyme Nomenclature of the Nomenclature Committee of the International Union of Biochemistry and Molecular Biology (NC-IUBMB). The IUBMB biochemical classification is a numerical classification system for enzymes based on the chemical reactions they catalyze.

[0086] “ATCC” refers to the American Type Culture Collection whose biorepository collection includes genes and strains.

[0087] “Oxalate decarboxylase polypeptide” or “oxalate decarboxylase” or “ODC” refers to a member of the enzyme class EC 4.1.1.2 or an enzyme that catalyzes the conversion of oxalate to formate and CO₂. In some embodiments, oxalate decarboxylase may additionally refer to enzymes that catalyzes the conversion of oxalate to hydrogen peroxide and CO₂.

[0088] “Protein,” “polypeptide,” and “peptide” are used interchangeably herein to denote a polymer of at least two amino acids covalently linked by an amide bond, regardless of length or post-translational modification (e.g., glycosylation or phosphorylation).

[0089] “Amino acids” are referred to herein by either their commonly known three-letter symbols or by the one-letter symbols recommended by IUPAC-IUB Biochemical Nomenclature Commission. The abbreviations used for the genetically encoded amino acids are conventional and are as follows: alanine (Ala or A), arginine (Arg or R), asparagine (Asn or N), aspartate (Asp or D), cysteine (Cys or C), glutamate (Glu or E), glutamine (Gln or Q), glycine (Gly or G), histidine (His or H), isoleucine (Ile or I), leucine (Leu or L), lysine (Lys or K), methionine (Met or M), phenylalanine (Phe or F), proline (Pro or P), serine (Ser or S), threonine (Thr or T), tryptophan (Trp or W), tyrosine (Tyr or Y), and valine (Val or V). When the three-letter abbreviations are used, unless specifically preceded by an “L” or a “D” or clear from the context in which the abbreviation is used, the amino acid may be in either the L- or D-configuration about α-carbon (Cα). For example, whereas “Ala” designates alanine without specifying the configuration about the α carbon, “D-Ala” and “L-Ala” designate D-alanine and L-alanine, respectively. When the one-letter abbreviations are used, upper case letters designate amino acids in the L-configuration about the α-carbon and lower-case letters designate amino acids in the D-configuration about the α-carbon. For example, “A” designates L-alanine and “a” designates D-alanine. When amino acid sequences are presented as a string of one-letter or three-letter abbreviations (or mixtures thereof), the sequences are presented in the amino (N) to carboxy (C) direction in accordance with common convention.

[0090] “Polynucleotide” or “nucleic acid” is used herein to denote a polymer comprising at least two nucleotides where the nucleotides are either deoxyribonucleotides or ribonucleotides or mixtures of deoxyribonucleotides and ribonucleotides. In some embodiments, the abbreviations used for the genetically encoding nucleosides are conventional and are as follow: adenosine (A); guanosine (G); cytidine (C); thymidine (T); and uridine (U). Unless specifically delineated, the abbreviated nucleosides may be either ribonucleosides or 2′-deoxyribonucleosides. The nucleosides may be specified as being either ribonucleosides or 2′-deoxyribonucleosides on an individual basis or on an aggregate basis. When nucleic acid sequences are presented as a string of one-letter abbreviations, the sequences are presented in the 5′ to 3′ direction in accordance with common convention, and the phosphates are not indicated. The term “DNA” refers to deoxyribonucleic acid. The term “RNA” refers to ribonucleic acid.

[0091] “Engineered,” “recombinant,” “non-naturally occurring,” and “variant,” when used with reference to a cell, a polynucleotide or a polypeptide refer to a material or a material corresponding to the natural or native form of the material that has been modified in a manner that would not otherwise exist in nature or is identical thereto but produced or derived from synthetic materials and/or by manipulation using recombinant techniques.

[0092] “Wild-type” and “naturally-occurring” refer to the form found in nature. For example, a wild-type polypeptide or polynucleotide sequence is a sequence present in an organism that can be isolated from a source in nature and which has not been intentionally modified by human manipulation.

[0093] “Coding sequence” refers to that part of a nucleic acid (e.g., a gene) that encodes an amino acid sequence of a protein.

[0094] “Percent (%) sequence identity” is used herein to refer to comparisons among polynucleotides and polypeptides, and are determined by comparing two optimally aligned sequences over a comparison window, wherein the portion of the polynucleotide or polypeptide sequence in the comparison window may comprise additions or deletions (i.e., gaps) as compared to the reference sequence for optimal alignment of the two sequences. The percentage may be calculated by determining the number of positions at which the identical nucleic acid base or amino acid residue occurs in both sequences to yield the number of matched positions, dividing the number of matched positions by the total number of positions in the window of comparison and multiplying the result by 100 to yield the percentage of sequence identity. Alternatively, the percentage may be calculated by determining the number of positions at which either the identical nucleic acid base or amino acid residue occurs in both sequences or a nucleic acid base or amino acid residue is aligned with a gap to yield the number of matched positions, dividing the number of matched positions by the total number of positions in the window of comparison and multiplying the result by 100 to yield the percentage of sequence identity. Those of skill in the art appreciate that there are many established algorithms available to align two sequences. Optimal alignment of sequences for comparison can be conducted (e.g., by the local homology algorithm of Smith and Waterman; Smith and Waterman, Adv. Appl. Math., 1981, 2:482), by the homology alignment algorithm of Needleman and Wunsch (Needleman and Wunsch, J. Mol. Biol., 1970, 48:443), by the search for similarity method of Pearson and Lipman (Pearson and Lipman, Proc. Natl. Acad. Sci. USA., 1988, 85:2444), by computerized implementations of these algorithms (e.g., GAP, BESTFIT, FASTA, and TFASTA in the GCG Wisconsin Software Package), or by visual inspection, as known in the art. Examples of algorithms that are suitable for determining percent sequence identity and sequence similarity include, but are not limited to the BLAST and BLAST 2.0 algorithms (See e.g., Altschul et al., J. Mol. Biol., 1990, 215:403-410; and Altschul et al., Nucleic Acids Res., 1977, 25:3389-3402). Software for performing BLAST analyses is publicly available through the National Center for Biotechnology Information website. This algorithm involves first identifying high scoring sequence pairs (HSPs) by identifying short words of length “W” in the query sequence, which either match or satisfy some positive-valued threshold score “T,” when aligned with a word of the same length in a database sequence. T is referred to as the neighborhood word score threshold (See, Altschul et al., supra). These initial neighborhood word hits act as seeds for initiating searches to find longer HSPs containing them. The word hits are then extended in both directions along each sequence for as far as the cumulative alignment score can be increased. Cumulative scores are calculated using, for nucleotide sequences, the parameters “M” (reward score for a pair of matching residues; always >0) and “N” (penalty score for mismatching residues; always <0). For amino acid sequences, a scoring matrix is used to calculate the cumulative score. Extension of the word hits in each direction are halted when: the cumulative alignment score falls off by the quantity “X” from its maximum achieved value; the cumulative score goes to zero or below, due to the accumulation of one or more negative-scoring residue alignments; or the end of either sequence is reached. The BLAST algorithm parameters W, T, and X determine the sensitivity and speed of the alignment. The BLASTN program (for nucleotide sequences) uses as defaults a wordlength (W) of 11, an expectation (E) of 10, M=5, N=-4, and a comparison of both strands. For amino acid sequences, the BLASTP program uses as defaults a wordlength (W) of 3, an expectation (E) of 10, and the BLOSUM62 scoring matrix (See e.g., Henikoff and Henikoff, Proc. Natl. Acad. Sci. USA, 1989, 89:10915). Exemplary determination of sequence alignment and % sequence identity can employ the BESTFIT or GAP programs in the GCG Wisconsin Software package (Accelrys, Madison WI), using default parameters provided.

[0095] “Reference sequence” refers to a defined sequence used as a basis for a sequence comparison. A reference sequence may be a subset of a larger sequence, for example, a segment of a full-length gene or amino acid sequence. Generally, a reference sequence is at least 20 nucleotide or amino acid residues in length, at least 25 residues in length, at least 50 residues in length, at least 100 residues in length or the full length of the nucleic acid or polypeptide. Since two polynucleotides or polypeptides may each (1) comprise a sequence (i.e., a portion of the complete sequence) that is similar between the two sequences, and (2) may further comprise a sequence that is divergent between the two sequences, sequence comparisons between two (or more) polynucleotides or polypeptide are typically performed by comparing sequences of the two polynucleotides or polypeptides over a “comparison window” to identify and compare local regions of sequence similarity. In some embodiments, a “reference sequence” can be based on a primary amino acid sequence, where the reference sequence is a sequence that can have one or more changes in the primary sequence. For instance, the phrase “reference sequence based on SEQ ID NO: 2 having a valine at the residue corresponding to X60” refers to a reference sequence in which the corresponding residue at position X60 in SEQ ID NO: 2 (e.g., a threonine), has been changed to valine.

[0096] “Comparison window” refers to a conceptual segment of at least about 20 contiguous nucleotide positions or amino acids residues wherein a sequence may be compared to a reference sequence of at least 20 contiguous nucleotides or amino acids and wherein the portion of the sequence in the comparison window may comprise additions or deletions (i.e., gaps) of 20 percent or less as compared to the reference sequence (which does not comprise additions or deletions) for optimal alignment of the two sequences. The comparison window can be longer than 20 contiguous residues, and includes, optionally 30, 40, 50, 100, or longer windows.

[0097] “Corresponding to”, “reference to,” and “relative to” when used in the context of the numbering of a given amino acid or polynucleotide sequence refer to the numbering of the residues of a specified reference sequence when the given amino acid or polynucleotide sequence is compared to the reference sequence. In other words, the residue number or residue position of a given polymer is designated with respect to the reference sequence rather than by the actual numerical position of the residue within the given amino acid or polynucleotide sequence. For example, a given amino acid sequence, such as that of an engineered ODC, can be aligned to a reference sequence by introducing gaps to optimize residue matches between the two sequences. In these cases, although the gaps are present, the numbering of the residue in the given amino acid or polynucleotide sequence is made with respect to the reference sequence to which it has been aligned.

[0098] “Mutation” refers to the alteration of a nucleic acid sequence. In some embodiments, mutations result in changes to the encoded amino acid sequence (i.e., as compared to the original sequence without the mutation). In some embodiments, the mutation comprises a substitution, such that a different amino acid is produced. In some alternative embodiments, the mutation comprises an addition, such that an amino acid is added (e.g., insertion) to the original amino acid sequence. In some further embodiments, the mutation comprises a deletion, such that an amino acid is deleted from the original amino acid sequence. Any number of mutations may be present in a given sequence. In some embodiments, the “substitution” comprises the deletion of an amino acid and can be denoted by “-” symbol.

[0099] “Amino acid difference” and “residue difference” refer to a difference in the amino acid residue at a position of an amino acid sequence relative to the amino acid residue at a corresponding position in a reference sequence. The positions of amino acid differences generally are referred to herein as “Xn,” where n refers to the corresponding position in the reference sequence upon which the residue difference is based. For example, a “residue difference at position X60 as compared to SEQ ID NO: 2” refers to a difference of the amino acid residue at the polypeptide position corresponding to position 60 of SEQ ID NO: 2. Thus, if the reference polypeptide of SEQ ID NO: 2 has a threonine at position 60, then a “residue difference at position X60 as compared to SEQ ID NO: 2” refers to an amino acid substitution of any residue other than threonine at the position of the polypeptide corresponding to position 60 of SEQ ID NO: 2. In some instances herein, the specific amino acid residue difference, e.g., substitution, at a position is indicated as “XnY” where “Xn” specifies the corresponding residue and position of the reference polypeptide (as described above), and “Y” is the single letter identifier of the amino acid found in the engineered polypeptide (i.e., the different residue than in the reference polypeptide). In some instances, the original amino acid is not indicated and the amino acid difference indicated as nY (e.g., 60V). In some embodiments, the phrase “an amino acid residue nY” denotes the presence of the amino acid residue in the engineered polypeptide, which may or may not be a substitution in context of a reference sequence.

[0100] In some instances, a polypeptide of the present disclosure can include one or more amino acid residue differences relative to a reference sequence, which is indicated by a list of the specified positions where residue differences are present relative to the reference sequence. In some embodiments, where more than one amino acid can be used in a specific residue position of a polypeptide, the various amino acid residues that can be used are separated by a “/” (e.g., X60Y/X60W/X60R or X60Y/W/R or 60Y/W/R). The present disclosure includes engineered amino acid sequences comprising one or more amino acid differences that include either/or both conservative and non-conservative amino acid substitutions.

[0101] “Amino acid substitution set” and “substitution set” refers to a group of amino acid substitutions within an amino acid sequence. In some embodiments, substitution sets comprise 2, 3, 4, 5, 6, 7, 8, 9, 10, 11, 12, 13, 14, 15, or more amino acid substitutions. In some embodiments, a substitution set refers to the set of amino acid substitutions that is present in any of the engineered polypeptides listed in any of the Tables in the Examples. In these substitution sets, the individual substitutions are separated by a semicolon (“;”; e.g., A16S;A26E or abbreviated 16S;26E) or slash (“/”; e.g., A16S/A26E, or abbreviated 16S/26E).

[0102] “Conservative amino acid substitution” refers to a substitution of a residue with a different residue having a similar side chain, and thus typically involves substitution of the amino acid in the polypeptide with amino acids within the same or similar defined class of amino acids. By way of example and not limitation, an amino acid with an aliphatic side chain may be substituted with another aliphatic amino acid (e.g., alanine, valine, leucine, and isoleucine); an amino acid with hydroxyl side chain is substituted with another amino acid with a hydroxyl side chain (e.g., serine and threonine); an amino acid having aromatic side chains is substituted with another amino acid having an aromatic side chain (e.g., phenylalanine, tyrosine, tryptophan, and histidine); an amino acid with a basic side chain is substituted with another amino acid with a basic side chain (e.g., lysine and arginine); an amino acid with an acidic side chain is substituted with another amino acid with an acidic side chain (e.g., aspartic acid or glutamic acid); and a hydrophobic or hydrophilic amino acid is replaced with another hydrophobic or hydrophilic amino acid, respectively. Exemplary conservative substitutions include the substitution of A, L, V, or I with other aliphatic residues (e.g., A, L, V, I) or other non-polar residues (e.g., A, L, V, I, G, M); substitution of G or M with other non-polar residues (e.g., A, L, V, I, G, M); substitution of D or E with other acidic residues (e.g., D, E); substitution of K or R with other basic residues (e.g., K, R); substitution of N, Q, S, or T with other polar residues (e.g., N, Q, S, T); substitution of H, Y, W, or F with other aromatic residues (e.g., H, Y, W, F); or substitution of C or P with other non-polar residues (e.g., C, P).

[0103] “Non-conservative substitution” refers to substitution of an amino acid in the polypeptide with an amino acid with significantly differing side chain properties. Non-conservative substitutions may use amino acids between, rather than within, the defined groups and affect: (a) the structure of the peptide backbone in the area of the substitution (e.g., proline for glycine); (b) the charge or hydrophobicity; and/or (c) the bulk of the side chain. By way of example and not limitation, exemplary non-conservative substitutions include an acidic amino acid substituted with a basic or aliphatic amino acid; an aromatic amino acid substituted with a small amino acid; and a hydrophilic amino acid substituted with a hydrophobic amino acid.

[0104] “Deletion” refers to modification to the polypeptide by removal of one or more amino acids from the reference polypeptide. Deletions can comprise removal of 1 or more amino acids, 2 or more amino acids, 5 or more amino acids, 10 or more amino acids, 15 or more amino acids, or 20 or more amino acids, up to 10% of the total number of amino acids, or up to 20% of the total number of amino acids making up the reference enzyme while retaining enzymatic activity and/or retaining the improved properties of an engineered oxalate decarboxylase enzyme. Deletions can be directed to the internal portions and/or terminal portions of the polypeptide. In various embodiments, the deletion can comprise a continuous segment or can be discontinuous.

[0105] “Insertion” refers to modification to the polypeptide by addition of one or more amino acids from the reference polypeptide. Insertions can be in the internal portions of the polypeptide, or to the carboxy or amino terminus. Insertions as used herein include fusion proteins as is known in the art. The insertion can be a contiguous segment of amino acids or separated by one or more of the amino acids in the naturally occurring polypeptide.

[0106] “Functional fragment” and “biologically active fragment” are used interchangeably herein, to refer to a polypeptide that has an amino-terminal and/or carboxy-terminal deletion(s) and/or internal deletions, but where the remaining amino acid sequence is identical to the corresponding positions in the sequence to which it is being compared (e.g., a full length engineered ODC of the present invention) and that retains substantially all of the activity of the full-length polypeptide.

[0107] “Isolated polypeptide” refers to a polypeptide which is substantially separated from other contaminants that naturally accompany it (e.g., protein, lipids, and polynucleotides). The term embraces polypeptides which have been removed or purified from their naturally-occurring environment or expression system (e.g., host cell or in vitro synthesis). The recombinant ODC polypeptides may be present within a cell, present in the cellular medium, or prepared in various forms, such as lysates or isolated preparations. As such, in some embodiments, the recombinant ODC polypeptides provided herein are isolated polypeptides.

[0108] “Substantially pure” or “purified” polypeptide or protein refers to a composition in which the polypeptide or protein species is the predominant species present (i.e., on a molar or weight basis it is more abundant than any other individual macromolecular species in the composition), and is generally a substantially purified composition when the object species comprises at least about 50 percent of the macromolecular species present by mole or % weight. Generally, a substantially pure ODC polypeptide composition will comprise about 60% or more, about 70% or more, about 80% or more, about 90% or more, about 95% or more, and about 98% or more of all macromolecular species by mole or % weight present in the composition. In some embodiments, the object species is purified to essential homogeneity (i.e., contaminant species cannot be detected in the composition by conventional detection methods) wherein the composition consists essentially of a single macromolecular species. Solvent species, small molecules (<500 Daltons), and elemental ion species are not considered macromolecular species. In some embodiments, the isolated recombinant ODC polypeptides are substantially pure polypeptide compositions.

[0109] “Improved enzyme property” refers to an engineered ODC polypeptide that exhibits an improvement in any enzyme property as compared to a reference ODC polypeptide, such as a wild-type ODC polypeptide (e.g., wild-type ODC corresponding to SEQ ID NO: 2) or another engineered ODC polypeptide. Improved properties include but are not limited to such properties as increased enzymatic activity, increased specific activity, increased protein production, increased thermoactivity, increased thermostability, increased pH activity, increased stability, increased substrate specificity and/or affinity, increased resistance to substrate and/or end-product inhibition, increased chemical stability, improved solvent stability, increased stability to acidic pH, increased resistance to proteases, reduced aggregation, increased solubility, and reduced immunogenicity (i.e., reduced capability of inducing and/or eliciting an immune response).

[0110] “Increased enzymatic activity” and “enhanced catalytic activity” refer to an improved property of the engineered ODC polypeptides, which can be represented by an increase in specific activity (e.g., product produced/time/weight protein) and/or an increase in percent conversion of the substrate to the product (e.g., percent conversion of starting amount of substrate to product in a specified time period using a specified amount of ODC) as compared to the reference ODC enzyme (e.g., wild-type ODC and/or another engineered ODC). Exemplary methods to determine enzyme activity are provided in the Examples. Any property relating to enzyme activity may be affected, including the classical enzyme properties of Km, Vmax or kcat, changes of which can lead to increased enzymatic activity. Improvements in enzyme activity can be from about 1.1 fold the enzymatic activity of the corresponding wild-type enzyme, to as much as 2-fold, 5-fold, 10-fold, 20-fold, 25- fold, 50-fold, 75-fold, 100-fold, 150-fold, 200-fold or more enzymatic activity than the naturally occurring ODC or another engineered ODC from which the ODC polypeptides were derived. In some specific embodiments, the engineered ODC enzyme exhibits improved enzymatic activity in the range of 1.5 to 10 fold, 1.5 to 25 fold, 1.5 to 50 fold, 1.5 to 100 fold or greater, than that of the reference ODC enzyme.

[0111] ODC enzyme activity can be measured by any standard assay known in the art (e.g., by monitoring depletion of reactants or formation of products). Exemplary methods of measuring ODC activity are provided in the Examples, such as Example 3. In some embodiments, comparisons of enzyme activities are made using a defined preparation of enzyme, a defined assay under a set condition, and one or more defined substrates, as further described in detail herein. Generally, when lysates are compared, the numbers of cells and the amount of protein assayed are determined as well as use of identical expression systems and identical host cells, in order to minimize variations in amount of enzyme produced by the host cells and present in the lysates.

[0112] “Increased storage stability” means that an engineered ODC polypeptide according to the invention will retain more activity compared to a reference ODC in a standard assay (e.g., as described in the Examples) after it has been produced in its storage form (e.g., solution, lyophilization, or spray-drying), and stored for a period of time ranging from a few days to multiple months at a defined temperature or temperatures (e.g., -20° C., 0° C., 4° C., 25° C., 30° C., 37° C., 45° C., 55° C., etc.).

[0113] “Conversion” refers to the enzymatic conversion (or biotransformation) of substrate(s) to the corresponding product(s). “Percent conversion” refers to the percent of the substrate that is converted to the product within a period of time under specified conditions. Thus, the “enzymatic activity” or “activity” of an ODC polypeptide can be expressed as “percent conversion” of the substrate to the product in a specific period of time.

[0114] “Hybridization stringency” relates to hybridization conditions, such as washing conditions, in the hybridization of nucleic acids. Generally, hybridization reactions are performed under conditions of lower stringency, followed by washes of varying but higher stringency (see, e.g., Sambrook et al., Molecular Cloning: A Laboratory Manual, Cold Spring Harbor Laboratory Press, New York, 2001; Ausubel et al., Current Protocols in Molecular Biology, John Wiley & Sons, 2003). The term “moderately stringent hybridization” refers to conditions that permit target-DNA to bind a complementary nucleic acid that has about 60% identity, preferably about 75% identity, about 85% identity to the target DNA, with greater than about 90% identity to target-polynucleotide. Exemplary moderately stringent conditions are conditions equivalent to hybridization in 50% formamide, 5× Denhart’s solution, 5×SSPE, 0.2% SDS at 42° C., followed by washing in 0.2×SSPE, 0.2% SDS, at 42° C. “High stringency hybridization” refers generally to conditions that are about 10° C. or less from the thermal melting temperature Tm as determined under the solution condition for a defined polynucleotide sequence. In some embodiments, a high stringency condition refers to conditions that permit hybridization of only those nucleic acid sequences that form stable hybrids in 0.018 M NaCl at 65° C. (i.e., if a hybrid is not stable in 0.018 M NaCl at 65° C., it will not be stable under high stringency conditions, as contemplated herein). High stringency conditions can be provided, for example, by hybridization in conditions equivalent to 50% formamide, 5× Denhart’s solution, 5×SSPE, 0.2% SDS at 42° C., followed by washing in 0.1×SSPE, and 0.1% SDS at 65° C. Another high stringency condition is hybridizing in conditions equivalent to hybridizing in 5X SSC containing 0.1% (w:v) SDS at 65° C. and washing in 0.1x SSC containing 0.1% SDS at 65° C. Other high stringency hybridization conditions, as well as moderately stringent conditions, are described in the references cited above.

[0115] “Codon optimized” refers to changes in the codons of the polynucleotide encoding a protein to those preferentially used in a particular organism such that the encoded protein is more efficiently expressed in that organism. Although the genetic code is degenerate, in that most amino acids are represented by several codons, called “synonyms” or “synonymous” codons, it is well known that codon usage by particular organisms is nonrandom and biased towards particular codon triplets. This codon usage bias may be higher in reference to a given gene, genes of common function or ancestral origin, highly expressed proteins versus low copy number proteins, and the aggregate protein coding regions of an organism’s genome. In some embodiments, the polynucleotides encoding the ODC enzymes are codon optimized for optimal production from the host organism selected for expression.

[0116] “Control sequence” refers herein to include all components that are necessary or advantageous for the expression of a polynucleotide and/or polypeptide of the present disclosure. Each control sequence may be native or foreign to the nucleic acid sequence encoding the polypeptide. Such control sequences include, but are not limited to, leaders, polyadenylation sequences, propeptide sequences, promoter sequences, signal peptide sequences, initiation sequences, and transcription terminators. At a minimum, the control sequences include a promoter, and transcriptional and translational stop signals. In some embodiments, the control sequences are provided with linkers for the purpose of introducing specific restriction sites facilitating ligation of the control sequences with the coding region of the nucleic acid sequence encoding a polypeptide.

[0117] “Operably linked” or “operatively linked” refers to a functional relationship between two or more nucleic acid segments. By way of illustration, the term refers to a configuration in which a control sequence is appropriately placed (i.e., in a functional relationship) at a position relative to a polynucleotide of interest such that the control sequence directs or regulates the expression of the polynucleotide, and where relevant, the encoded polypeptide of interest.

[0118] “Promoter sequence” refers to a nucleic acid sequence that is recognized by a host cell for expression of a polynucleotide of interest, such as a coding sequence. The promoter sequence contains transcriptional control sequences that mediate the expression of a polynucleotide of interest. The promoter may be any nucleic acid sequence which shows transcriptional activity in the host cell of choice including mutant, truncated, and hybrid promoters, and may be obtained from genes encoding extracellular or intracellular polypeptides either homologous or heterologous to the host cell.

[0119] “Substrate” in the context of an enzymatic conversion reaction process refers to the compound or molecule acted on by the ODC polypeptide. “Product” in the context of an enzymatic conversion process refers to the compound or molecule resulting from the action of the ODC polypeptide on the substrate.

[0120] “Culturing” or “cultured” refers to the growing of a population of cells under suitable conditions using any suitable medium (e.g., liquid, gel, or solid).

[0121] “Vector” as used herein refers to a DNA construct for introducing a DNA sequence into a cell. In some embodiments, the vector is an expression vector that is operably linked to a suitable control sequence capable of effecting the expression in a suitable host of the polypeptide encoded in the DNA sequence. In some embodiments, an “expression vector” has a promoter sequence operably linked to the DNA sequence (e.g., transgene) to drive expression in a host cell, and in some embodiments, also comprises a transcription terminator sequence.

[0122] “Expression” as used herein includes any step involved in the production of the polypeptide including, but not limited to, transcription, post-transcriptional modification, translation, and post-translational modification. In some embodiments, the term also encompasses secretion of the polypeptide from a cell.

[0123] “Heterologous” or “recombinant” refers to the relationship between two or more nucleic acid or amino acid sequences (e.g., a promoter sequence, signal peptide, terminator sequence, etc.) that are derived from different sources and are not associated in nature.

[0124] “Host cell” and “host strain” refer to suitable hosts for expression vectors comprising DNA provided herein (e.g., a polynucleotide sequences encoding at least one ODC variant). In some embodiments, the host cells are prokaryotic or eukaryotic cells that have been transformed or transfected with vectors constructed using recombinant DNA techniques as known in the art.

[0125] “Subject” as used herein encompasses mammals such as humans, non-human primates, livestock (e.g., cows, pigs, camels, etc.), companion animals (e.g., cats, dogs, etc.), and laboratory animals (e.g., rats, mice, guinea pigs, and lagamorphs). It is intended that the term encompass females as well as males. A subject who is a “patient” means any subject that is being assessed for, treated for, or is experiencing disease.

[0126] “Infant” refers to a child in the period of the first month after birth to approximately one (1) year of age. As used herein, the term “newborn” refers to child in the period from birth to the 28th day of life. The term “premature infant” refers to an infant born after the twentieth completed week of gestation, yet before full term, generally weighing ~500 to ~2499 grams at birth.

[0127] “Child” refers to a person who has not attained the legal age for consent to treatment or research procedures. In some embodiments, the term refers to a person between the time of birth and adolescence.

[0128] “Adult” refers to a person who has attained legal age for the relevant jurisdiction (e.g., 18 years of age in the United States). In some embodiments, the term refers to any fully grown, mature organism. In some embodiments, the term “young adult” refers to a person less than 18 years of age, but who has reached sexual maturity.

[0129] “Composition” and “formulation” encompass products comprising at least one engineered ODC of the present disclosure, intended for any suitable use (e.g., pharmaceutical compositions, dietary/nutritional supplements, feed, etc.).

[0130] “Therapeutic” as used herein refers to an agent administered to a subject who shows signs or symptoms of pathology having beneficial or desirable medical effects.

[0131] “Pharmaceutical composition” as used herein refers to a composition suitable for pharmaceutical use in a mammalian subject (e.g., human) comprising a pharmaceutically effective amount of an engineered ODC polypeptide encompassed by the invention and an acceptable carrier.

[0132] “Carrier” when used in reference to a pharmaceutical composition means any of the standard pharmaceutical carrier, buffers, and excipients, such as stabilizers, preservatives, and adjuvants.

[0133] “Excipient” refers to any pharmaceutically acceptable additive, carrier, diluent, adjuvant, or other ingredient, other than the active pharmaceutical ingredient (API; e.g., the engineered ODC polypeptides of the present invention). Excipients are typically included for formulation and/or administration purposes.

[0134] “Pharmaceutically acceptable” means a material that can be administered to a subject without causing any undesirable biological effects or interacting in a deleterious manner with any of the components in which it is contained and that possesses the desired biological activity.

[0135] “Effective amount” refers to an amount sufficient to produce the desired result. The effective amount can be determined by one of general skill in the art by methods known in the art and the guidance provided herein.

[0136] “Therapeutically effective amount” when used in reference to symptoms of disease/condition refers to the amount and/or concentration of a compound (e.g., engineered ODC polypeptides) that ameliorates, attenuates, or eliminates one or more symptom of a disease/condition or prevents or delays the onset of symptom(s) (e.g., hyperoxaluria). In some embodiments, the term is use in reference to the amount of a composition that elicits the biological (e.g., medical) response by a tissue, system, or animal subject that is sought by the researcher, physician, veterinarian, or other clinician. “Therapeutically effective amount” when used in reference to a disease/condition refers to the amount and/or concentration of a composition that ameliorates, attenuates, or eliminates the disease/condition.

[0137] “Treating” or “treatment” of a disease, disorder, or syndrome, as used herein, includes (i) preventing the disease, disorder, or syndrome from occurring in a subject, i.e., causing the clinical symptoms of the disease, disorder, or syndrome not to develop in an animal that may be exposed to or predisposed to the disease, disorder, or syndrome but does not yet experience or display symptoms of the disease, disorder, or syndrome; (ii) inhibiting the disease, disorder, or syndrome, i.e., arresting its development; and (iii) relieving the disease, disorder, or syndrome, i.e., causing regression of the disease, disorder, or syndrome. As such, the terms “treating,” “treat” and “treatment” encompass preventative (e.g., prophylactic), as well as palliative treatment. As is known in the art, adjustments for systemic versus localized delivery, age, body weight, general health, sex, diet, time of administration, drug interaction and the severity of the condition can be made by those skilled in the art.

### Engineered Oxalate Decarboxylase Polypeptides

[0138] In one aspect, the present disclosure provides engineered oxalate decarboxylase (ODC) polypeptides for conversion/degradation of oxalate. In some embodiments, the engineered oxalate decarboxylase polypeptides are variants of the wild-type oxalate decarboxylase of Gemmata sp. SH-PL17. In some embodiments, in the present disclosure when a particular engineered oxalate decarboxylase variant (i.e., an engineered ODC polypeptide) is referred to by reference to amino acid differences in particular amino acids residues in the sequence of a wild-type oxalate decarboxylase or reference oxalate decarboxylase, it is to be understood that variants of another oxalate decarboxylase modified in the equivalent position(s) (as determined from the optional amino acid sequence alignment between the respective amino acid sequences) are to be encompassed herein.

[0139] Furthermore, the present disclosure describes exemplary engineered ODC polypeptides having oxalate decarboxylase activity. The Examples and the exemplary engineered oxalate decarboxylase presented in the Tables (i.e., Tables 4-1, 4-2, 4-3, 4-4, 4-5, 4-6, 4-7, 5-1, and 5-2) provide sequence structural information correlating specific amino acid sequence features with the functional activity (e.g., improved property) of the engineered oxalate decarboxylase polypeptides. This structure-function correlation information is provided in the form of specific amino acid residue differences relative to the reference engineered oxalate decarboxylase polypeptide of SEQ ID NO: 2 or 4, as well as associated experimentally determined activity data for the exemplary engineered ODC polypeptides.

[0140] In some embodiments, an engineered oxalate decarboxylase polypeptide comprises an amino acid sequence having at least 70%, 75%, 80%, 81%, 82%, 83%, 84%, 85%, 86%, 87%, 88%, 89%, 90%, 91%, 92%, 93%, 94%, 95%, 96%, 97%, 98%, 99%, or more sequence identity to a reference sequence corresponding to SEQ ID NO: 2, 4, 172, 320, 396, 616, 670, 750, or 906, or to a reference sequence corresponding to residues 1-359 of SEQ ID NO: 172, 320, or 396, wherein the amino acid sequence comprises one or more amino acid substitutions relative to the reference sequence corresponding to SEQ ID NO: 2, 4, 172, 320, 396, 616, 670, 750, or 906, or relative to the reference sequence corresponding to residues 1-359 of SEQ ID NO: 172, 320, or 396.

[0141] In some embodiments, the engineered oxalate decarboxylase polypeptide comprises an amino acid sequence having at least 70%, 75%, 80%, 81%, 82%, 83%, 84%, 85%, 86%, 87%, 88%, 89%, 90%, 91%, 92%, 93%, 94%, 95%, 96%, 97%, 98%, 99%, or more sequence identity to the reference sequence corresponding to SEQ ID NO: 2 or 4, wherein the amino acid sequence comprises one or more amino acid substitutions relative to the reference sequence corresponding to SEQ ID NO: 2 or 4.

[0142] In some embodiments, the engineered oxalate decarboxylase polypeptide comprises an amino acid sequence having at least 70%, 75%, 80%, 81%, 82%, 83%, 84%, 85%, 86%, 87%, 88%, 89%, 90%, 91%, 92%, 93%, 94%, 95%, 96%, 97%, 98%, 99%, or more sequence identity to the reference sequence corresponding to SEQ ID NO: 172, 320, 396, 616, 670, 750, or 906, or to the reference sequence corresponding to residues 1-359 of SEQ ID NO: 172, 320, or 396, wherein the amino acid sequence comprises one or more amino acid substitutions relative to the reference sequence of SEQ ID NO: 2 or 4.

[0143] In some embodiments, the engineered oxalate decarboxylase polypeptide comprises an amino acid sequence having at least 70%, 75%, 80%, 81%, 82%, 83%, 84%, 85%, 86%, 87%, 88%, 89%, 90%, 91%, 92%, 93%, 94%, 95%, 96%, 97%, 98%, 99%, or more sequence identity to the reference sequence corresponding to an even-numbered SEQ ID NO. of SEQ ID NOs: 28-1622, or to the reference sequence corresponding to residues 1-359 of an even-numbered SEQ ID NO. of SEQ ID NOs: 28-614, wherein the amino acid sequence comprises one or more amino acid substitutions relative to the reference sequence of SEQ ID NO: 2 or 4.

[0144] In some embodiments, the amino acid sequence of the engineered oxalate decarboxylase polypeptide comprises at least a substitution at amino acid position 4, 5, 6, 7, 10, 11, 13, 14, 16, 17, 18, 19, 22, 26, 31, 33, 35, 37, 40, 43, 44, 46, 52, 54, 60, 61, 62, 63, 76, 79, 80, 82, 83, 85, 94, 96, 97, 103, 104, 106, 110, 117, 121, 123, 124, 125, 126, 128, 141, 149, 153, 155, 156, 160, 162, 164, 166, 169, 173, 174, 176, 180, 182, 183, 186, 187, 188, 189, 190, 193, 195, 196, 197, 199, 200, 205, 206, 208, 210, 212, 216, 219, 226, 227, 232, 233, 234, 240, 242, 243, 263, 265, 266, 267, 269, 270, 273, 274, 277, 284, 297, 301, 303, 304, 314, 316, 318, 331, 335, 339, 342, 343, 346, 347, 350, 351, 356, or 359, or combinations thereof, wherein the amino acid positions are relative to the reference sequence corresponding to SEQ ID NO: 2 or 4.

[0145] In some embodiments, the amino acid sequence of the engineered oxalate decarboxylase polypeptide comprises at least a substitution 4C/R/S, 5C/S, 6A/S/W, 7G, 10A/Q/R, 11R, 13A/C/D/E/F/G/I/K/L/M/N/P/Q/R/S/T/V/W/Y, 14L, 16C/D/E/F/G/H/I/K/L/M/N/P/Q/R/S/T/V/W/Y, 17A/C/D/E/F/G/I/K/L/M/N/P/Q/R/S/T/V/W/Y, 18G/Q/R, 19C, 22R, 26C/D/E/F/G/H/I/K/L/M/N/P/Q/R/S/T/V/W/Y, 31A/C/D/F/G/H/I/K/L/M/N/P/Q/R/S/T/V/W/Y, 33R, 35V, 37A/C/D/E/F/G/H/I/L/M/N/P/Q/R/S/T/V/W/Y, 40S, 43C, 44S, 46R, 52T, 54L, 60A/C/D/E/F/G/H/I/K/L/M/N/P/Q/R/S/V/W/Y, 61M, 62G, 63A/S, 76S, 79C/D/E/F/G/H/I/K/L/M/N/P/Q/R/S/T/V/W/Y, 80L, 82I, 83A/C/D/E/F/G/H/I/K/L/M/N/P/Q/R/S/V/W/Y, 85E/G/R, 94N/T, 96C/D/E/F/G/H/I/K/L/M/N/P/Q/R/S/T/V/W/Y, 97T, 103Q/S/V, 104Q, 106C, 110V, 117A, 121W, 123G/Q/S, 124A/C/G/Q/R/T, 125E/F/S, 126T, 128A, 141Q, 149T, 153H/Q/S, 155L/P/R/V, 156E, 160T, 162A/C/D/E/F/H/I/K/L/M/N/P/Q/R/S/T/V/W/Y, 164R/V, 166R, 169A/G/L, 173Q/V, 174A/C/E/F/G/H/I/K/L/M/N/P/Q/R/S/T/V/W/Y, 176L, 180E, 182R, 183C/E/I/K, 186N, 187L/R/S, 188A, 189R, 190G/Q, 193A/G, 195A/C/D/E/F/G/H/I/K/L/M/N/P/Q/S/T/V/W/Y, 196F/M/R/S/V, 197E, 199G/V, 200N, 205A, 206M, 208G, 210A/C/D/E/F/G/H/I/K/L/M/N/Q/R/S/T/V/W/Y, 212A/F/G/L/S/V, 216S/W, 219V, 226S, 227E/S, 232T, 233D/H/R, 234L, 240E, 242D, 243V, 263S, 265C, 266V, 267R, 269S, 270L, 273A, 274Q/S, 277A/C/D/E/F/G/H/I/K/L/M/N/P/Q/R/S/T/V/W, 284A/R/S, 297Y, 301I/Q/T, 303T, 304D/G, 314S, 316K/V, 318A/C/D/F/G/H/I/K/L/M/N/P/Q/R/S/T/V/W/Y, 331I/L/P/V, 335R, 339G, 342A/E/P/R, 343R/W, 346G/L/Q/W, 347F/R, 350R, 351A/E/H, 356S, or 359L/W, or combinations thereof, wherein the amino acid positions are relative to the reference sequence corresponding to SEQ ID NO: 2 or 4.

[0146] In some embodiments, the amino acid sequence of the engineered oxalate decarboxylase polypeptide comprises at least a substitution P4C/R/S, T5C/S, F6A/S/W, M7G, V10A/Q/R, P11R, H13A/C/D/E/F/G/I/K/L/M/N/P/Q/R/S/T/V/W/Y, V14L, A16C/D/E/F/G/H/I/K/L/M/N/P/Q/R/S/T/V/W/Y, H17A/C/D/E/F/G/I/K/L/M/N/P/Q/R/S/T/V/W/Y, K18G/Q/R,, D19C, T22R, A26C/D/E/F/G/H/I/K/L/M/N/P/Q/R/S/T/V/W/Y, E31A/C/D/F/G/H/I/K/L/M/N/P/Q/R/S/T/V/W/Y, K33R, I35V, K37A/C/D/E/F/G/H/I/L/M/N/P/Q/R/S/T/V/W/Y, G40S, A43C, T44S, V46R, K52T, I54L, T60A/C/D/E/F/G/H/I/K/L/M/N/P/Q/R/S/V/W/Y, L61M, E62G, P63A/S, A76S, A79C/D/E/F/G/H/I/K/L/M/N/P/Q/R/S/T/V/W/Y, F80L/I, L82I, T83A/C/D/E/F/G/H/I/K/L/M/N/P/Q/R/S/V/W/Y, H85E/G/R, Q94N/T, A96C/D/E/F/G/H/I/K/L/M/N/P/Q/R/S/T/V/W/Y, A97T, G103Q/S/V, P104Q, D106C, F110V, M117A, L121W, D123G/Q/S, K124A/C/G/Q/R/T, P125E/F/S, A126T, F128A, G141Q, I149T, P153H/Q/S, A155L/P/R/V, L156E, N160T, G162A/C/D/E/F/H/I/K/L/M/N/P/Q/R/S/T/V/W/Y, P164R/V, S166R, D169A/G/L, K173Q/V, D174A/C/E/F/G/H/I/K/L/M/N/P/Q/R/S/T/V/W/Y, V176L, R180E, A182R, V183C/E/I/K, A186N, T187L/R/S, P188A, A189R, A190G/Q, Q193A/G, R195A/C/D/E/F/G/H/I/K/L/M/N/P/Q/S/T/V/W/Y, K196F/M/R/S/V, L197E, P199G/V, L200N, E205A, L206M, E208G, P210A/C/D/E/F/G/H/I/K/L/M/N/Q/R/S/T/V/W/Y, H212A/F/G/L/S/V, K216S/W, R219V, T226S, R227E/S, K232T, T233D/H/R, V234L, D240E, E242D, P243V, D263S, N265C, I266V, S267R, T269S, M270L, S273A, H274Q/S, Y277A/C/D/E/F/G/H/I/K/L/M/N/P/Q/R/S/T/V/W, K284A/R/S, S297Y, V301I/Q/T, D303T, R304D/G, T314S, N316K/V, E318A/C/D/F/G/H/I/K/L/M/N/P/Q/R/S/T/V/W/Y, A331I/L/P/V, A335R, S339G, T342A/E/P/R, S343R/W, E346G/L/Q/W, K347F/R, K350R, Q351A/E/H, A356S, or K359L/W, or combinations thereof, wherein the amino acid positions are relative to the reference sequence corresponding to SEQ ID NO: 2 or 4.

[0147] In some embodiments, the amino acid sequence of the engineered oxalate decarboxylase polypeptide comprises at least a substitution at amino acid position 13, 14, 16, 17, 26, 31, 37, 60, 79, 83, 96, 162, 174, 195, 196, 210, 226, 277, 301, or 318, or combinations thereof, wherein the amino acid positions are relative to the reference sequence corresponding to SEQ ID NO: 2 or 4.

[0148] In some embodiments, the amino acid sequence of the engineered oxalate decarboxylase polypeptide comprises at least a substitution 13A/C/D/E/F/G/I/K/L/M/N/P/Q/R/S/T/V/W/Y, 14L, 16C/D/E/F/G/H/I/K/L/M/N/P/Q/R/S/T/V/W/Y, 17A/C/D/E/F/G/I/K/L/M/N/P/Q/R/S/T/V/W/Y, 26C/D/E/F/G/H/I/K/L/M/N/P/Q/R/S/T/V/W/Y, 31A/C/D/F/G/H/I/K/L/M/N/P/Q/R/S/T/V/W/Y, 37A/C/D/E/F/G/H/I/L/M/N/P/Q/R/S/T/V/W/Y, 60A/C/D/E/F/G/H/I/K/L/M/N/P/Q/R/S/V/W/Y, 79C/D/E/F/G/H/I/K/L/M/N/P/Q/R/S/T/V/W/Y, 83A/C/D/E/F/G/H/I/K/L/M/N/P/Q/R/S/V/W/Y, 96C/D/E/F/G/H/I/K/L/M/N/P/Q/R/S/T/V/W/Y, 162A/C/D/E/F/H/I/K/L/M/N/P/Q/R/S/T/V/W/Y, 174A/C/E/F/G/H/I/K/L/M/N/P/Q/R/S/T/V/W/Y, 195A/C/D/E/F/G/H/I/K/L/M/N/P/Q/S/T/V/W/Y, 196F/M/R/S/V, 210A/C/D/E/F/G/H/I/K/L/M/N/Q/R/S/T/V/W/Y, 226S, 277A/C/D/E/F/G/H/I/K/L/M/N/P/Q/R/S/T/V/W, 301I/Q/T, or 318A/C/D/F/G/H/I/K/L/M/N/P/Q/R/S/T/V/W/Y, or combinations thereof, wherein the amino acid positions are relative to the reference sequence corresponding to SEQ ID NO: 2 or 4.

[0149] In some embodiments, the amino acid sequence of the engineered oxalate decarboxylase polypeptide comprises at least a substitution 13P, 14L, 16S, 17H/G, 26E, 31K, 37G, 60V, 79G, 83W, 96L, 162K, 174K, 195L, 196V, 210A/E, 226S, 277V, 301I, or 318Q, or combinations thereof, wherein the amino acid positions are relative to the reference sequence corresponding to SEQ ID NO: 2 or 4.

[0150] In some embodiments, the amino acid sequence of the engineered oxalate decarboxylase polypeptide comprises at least a substitution or substitution set at amino acid position(s) 31, 210, 318, or 31/210/318, wherein the amino acid positions are relative to the reference sequence corresponding to SEQ ID NO: 2 or 4.

[0151] In some embodiments, the amino acid sequence of the engineered oxalate decarboxylase polypeptide comprises at least a substitution or substitution set 31K, 210A/E, 318Q, or 31K/210A/318Q, wherein the amino acid positions are relative to the reference sequence corresponding to SEQ ID NO: 2 or 4.

[0152] In some embodiments, the amino acid sequence of the engineered oxalate decarboxylase polypeptide comprises as least a substitution or substitution set at amino acid position(s) 16, 26, 174, 195, 196, 210, 226, or 16/26/174/195/196/210/226, wherein the amino acid positions are relative to the reference sequence corresponding to SEQ ID NO: 2 or 4.

[0153] In some embodiments, the amino acid sequence of the engineered oxalate decarboxylase polypeptide comprises at least a substitution or substitution set 16S, 26E, 174K, 195L, 196V, 210E, 226S, or 16S/26E/174K/195L/196V/210E/226S, wherein the amino acid positions are relative to the reference sequence corresponding to SEQ ID NO: 2 or 4.

[0154] In some embodiments, the amino acid sequence of the engineered oxalate decarboxylase polypeptide comprises at least a substitution or substitution set at amino acid position(s) 13, 17, 196, or 13/17/196, wherein the amino acid positions are relative to the reference sequence corresponding to SEQ ID NO: 2 or 4.

[0155] In some embodiments, the amino acid sequence of the engineered oxalate decarboxylase polypeptide comprises at least a substitution or substitution set 13P, 17H, 196K, or 13P/17H/196K, wherein the amino acid positions are relative to the reference sequence corresponding to SEQ ID NO: 2 or 4.

[0156] In some embodiments, the amino acid sequence of the engineered oxalate decarboxylase polypeptide comprises at least a substitution or substitution set at amino acid position(s) 17, 60, 301, or 17/60/301, wherein the amino acid positions are relative to the reference sequence corresponding to SEQ ID NO: 2 or 4.

[0157] In some embodiments, the amino acid sequence of the engineered oxalate decarboxylase polypeptide comprises at least a substitution or substitution set 17G, 60V, 301I, or 17G/60V/301I, wherein the amino acid positions are relative to the reference sequence corresponding to SEQ ID NO: 2 or 4.

[0158] In some embodiments, the amino acid sequence of the engineered oxalate decarboxylase polypeptide comprises at least a substitution at amino acid position 37, wherein the amino acid position is relative to the reference sequence corresponding to SEQ ID NO: 2 or 4.

[0159] In some embodiments, the amino acid sequence of the engineered oxalate decarboxylase polypeptide comprises at least a substitution 37G, wherein the amino acid position is relative to the reference sequence corresponding to SEQ ID NO: 2 or 4.

[0160] In some embodiments, the amino acid sequence of the engineered oxalate decarboxylase polypeptide comprises at least a substitution or substitution set at amino acid position(s) 14, 60, 162, 226, or 14/60/162/226, wherein the amino acid positions are relative to the reference sequence corresponding to SEQ ID NO: 2 or 4.

[0161] In some embodiments, the amino acid sequence of the engineered oxalate decarboxylase polypeptide comprises at least a substitution or substitution set 14L, 60V, 162K, 226T, or 14L/60V/162K/226T, wherein the amino acid positions are relative to the reference sequence corresponding to SEQ ID NO: 2 or 4.

[0162] In some embodiments, the amino acid sequence of the engineered oxalate decarboxylase polypeptide comprises at least a substitution or substitution set at amino acid position(s) 83, 96, 277, or 83/96/277, wherein the amino acid positions are relative to the reference sequence corresponding to SEQ ID NO: 2 or 4.

[0163] In some embodiments, the amino acid sequence of the engineered oxalate decarboxylase polypeptide comprises at least a substitution or substitution set 83W, 96L, 277V, or 83W/96L/277V, wherein the amino acid positions are relative to the reference sequence corresponding to SEQ ID NO: 2 or 4.

[0164] In some embodiments, the amino acid sequence of the engineered oxalate decarboxylase polypeptide comprises at least a substitution or substitution set at amino acid position(s) 346, 124, 359, 174, 173, 123, 196, 304, 301, 347, 11, 284, 210, 169, 216, 195, 339, 4, 6, 180, 80, 243, 182, 7, 226, 156, 183, 227, 219, 62, 343, 16/26, 16/26/242, 16/26/183/232, 155/206/242, 16/26/339, 16/26/155/206/339, 26, 26/206/339, 31/82/210, 31/82, 31/356, 31/97/226, 31/240/270, 31/82/226, 31/240, 31, 31/210/318, or 31/210, or combinations thereof, wherein the amino acid positions are relative to the reference sequence corresponding to SEQ ID NO: 2 or 4.

[0165] In some embodiments, the amino acid sequence of the engineered oxalate decarboxylase polypeptide comprises at least a substitution or substitution set 346G, 346L, 124G, 124T, 359L, 174K, 173V, 123Q, 196F, 304D, 301Q, 347F, 359W, 124Q, 124A, 11R, 284R, 210L, 169L, 304G, 216W, 347R, 196V, 284A, 195L, 339G, 4S, 196R, 6A, 124C, 195Y, 180E, 80L, 243V, 182R, 210E, 7G, 226S, 174A, 196M, 4C, 156E, 183E, 227S, 219V, 62G, 174G, 169G, 124R, 210V, 343R, 216S, 210R, 6W, 4R, 6S, 16S/26E, 16S/26E/242D, 16S/26E/183I/232T, 155P/206M/242D, 16S/26E/339G, 16S/26E/155P/206M/339G, 26E, 26E/206M/339G, 31K/82I/210A, 31K/82I, 31K/356S, 31K/97T/226S, 31K/240E/270L, 31K/82I/226S, 31K/240E, 31K, 31K/210A/318Q, or 31K/210A, wherein the amino acid positions are relative to the reference sequence corresponding to SEQ ID NO: 2 or 4.

[0166] In some embodiments, the amino acid sequence of the engineered oxalate decarboxylase polypeptide comprises at least a substitution or substitution set E346G, E346L, K124G, K124T, K359L, D174K, K173V, D123Q, K196F, R304D, V301Q, K347F, K359W, K124Q, K124A, P11R, K284R, P210L, D169L, R304G, K216W, K347R, K196V, K284A, R195L, S339G, P4S, K196R, F6A, K124C, R195Y, R180E, F80L, P243V, A182R, P210E, M7G, T226S, D174A, K196M, P4C, L156E, V183E, R227S, R219V, E62G, D174G, D169G, K124R, P210V, S343R, K216S, P210R, F6W, P4R, F6S, A16S/A26E, A16S/A26E/E242D, A16S/A26E/V183I/K232T, A155P/L206M/E242D, A16S/A26E/S339G, A16S/A26E/A155P/L206M/S339G, A26E, A26E/L206M/S339G, E31K/L82I/P210A, E31K/L82I, E31K/A356S, E31K/A97T/T226S, E31K/D240E/M270L, E31K/L82I/T226S, E31K/D240E, E31K, E31K/P210A/E318Q, or E31K/P210A, wherein the amino acid positions are relative to the reference sequence corresponding to SEQ ID NO: 2 or 4.

[0167] In some embodiments, the amino acid sequence of the engineered oxalate decarboxylase polypeptide comprises at least a substitution or substitution set at amino acid position(s) 13, 212, 124/196/210/226, 5, 16/26/124/155/195/210/284, 196/226, 16/155/195/210/226, 16/195/210/226, 16/155/174/196, 16/195/226, 318, 16/195/196/210, 16/26/124/155/174/196/210, 195/210, 26/155/174/210, 316, 60, 16/155/174, 16/124/174/196, 16/226, 16/26/174/196/226, 17, 331, 124/195, 16/174/196, 188, 195/196/210, 174/196/210, 16/26/155/174, 16/155/195/196/226, 195/226/284, 16, 240, 16/26/124/155/195/196/226, 183/232/339/343, 183/206, 63, 173/347, 16/26/174/196, 16/284, 46, 16/124/195/196, 274, 174/196, 155/174/196, 174/196/226, 16/124/155/174/195, 16/26/155/174/196, 26/174/196/210/284, 16/195/196/284, 174, 16/124/174/195/210/226/284, 16/174/195/284, 26/174/196/210/226/284, 174/196/226/284, 124/174/196, 26/174/195/210/226, 162, 16/124/195/196/284, 206/343, 16/195/196, 16/26/174/195/196/210/226, 155/195/196/226, 18, 335, 124/155/174/195/226, 26/155/174/195/226, 195/196, 153, 155/174/195, 174/195/210/284, 174/195, 37, 124/174/195/226/284, 176, 16/155/174/195/196/226/284, 10, 169/173, 155, 33, 173/183/343/347, 104/265, or 233, wherein the amino acid positions are relative to the reference sequence corresponding to SEQ ID NO: 2 or 4.

[0168] In some embodiments, the amino acid sequence of the engineered oxalate decarboxylase polypeptide comprises at least a substitution or substitution set 13P, 212S, 124A/196V/210E/226S, 5S, 13E, 16S/26E/124A/155P/195L/210E/284A, 196V/226S, 16S/155P/195L/210E/226S, 16S/195L/210E/226S, 16S/155P/174K/196V, 16S/195L/226S, 13L, 318E, 16S/195L/196V/210E, 16S/26E/124A/155P/174K/196V/210E, 195L/210E, 26E/155P/174K/210E, 316V, 60V, 16S/155P/174K, 16S/124A/174K/196V, 16S/226S, 16S/26E/174K/196V/226S, 17H, 331V, 124A/195L, 16S/174K/196V, 17A, 188A, 195L/196V/210E, 174K/196V/210E, 5C, 16S/26E/155P/174K, 16S/155P/195L/196V/226S, 195L/226S/284A, 17N, 16L, 240E, 16S/26E/124A/155P/195L/196V/226S, 331P, 1831/232T/339G/343R, 183I/206M, 63A, 173V/347R, 16S/26E/174K/196V, 16S/284A, 60R, 46R, 16S/124A/195L/196V, 274S, 331I, 174K/196V, 155P/174K/196V, 174K/196V/226S, 331L, 16S/124A/155P/174K/195L, 16S/26E/155P/174K/196V, 26E/174K/196V/210E/284A, 212A, 16S/195L/196V/284A, 174K, 16S/124A/174K/195L/210E/226S/284A, 16S/174K/195L/284A, 26E/174K/196V/210E/226S/284A, 212L, 174K/196V/226S/284A, 124A/174K/196V, 26E/174K/195L/210E/226S, 162A, 16S/124A/195L/196V/284A, 206M/343R, 16S/195L/196V, 16S/26E/174K/195L/196V/210E/226S, 155P/195L/196V/226S, 18Q, 335R, 124A/155P/174K/195L/226S, 17C, 26E/155P/174K/195L/226S, 195L/196V, 162T, 153H, 316K, 155P/174K/195L, 153Q, 174K/195L/210E/284A, 174K/195L, 153S, 212F, 37C, 212V, 124A/174K/195L/226S/284A, 176L, 16S/155P/174K/195L/196V/226S/284A, 10Q, 169G/173V, 155L, 18G, 60L, 10A, 18R, 33R, 212G, 10R, 13R, 173V/1831/343R/347R, 16R, 104Q/265C, 233R, or 233D, wherein the amino acid positions are relative to the reference sequence corresponding to SEQ ID NO: 2 or 4.

[0169] In some embodiments, the amino acid sequence of the engineered oxalate decarboxylase polypeptide comprises at least a substitution or substitution set at amino acid position(s) 13/17/196, 17/212/331, 17/26/196/212/226, 17/26/196/212/226/331, 13/17/26/196/331, 17/60/196/226, 17/46/212, 26/60/196/226/331, 17/46/196/212/274/331, 212, 17/196/226, 13/17/26/212/331, 13/17/212/226/331, 196/212/331, 13/17/196/331, 13/17/26/212/226/331, 17/60/196/212/226/331, 13/17/212, 13/17/26/331, 13/17, 13/17/26/196, 46/196/212/226, 17/60/196, 17/196/331, 13/17/46/226/331, 17/196/226/331, 17/46/196/212/331, 17/46/212/331, 17/196, 13/17/212/226, 17/212, 17/26/212, 13/17/226/331, 17/196/212/331, 17/196/212/226/331, 13/17/26/226/331, 46/60/196/226/331, 17/46/196/331, 13/17/46/196, 196/212, 13/17/26, 17/83/263, 17/83/173/227, 17/227/301, 17/83/227/263, 17/83/125, 17/83/173, 17/263/301, 17/125, 17/83/301, 17/173, 17/83/227, 17/227, 17, 17/125/227, 17/83, 128, 76, 141, 110, 79, 117, or 61, wherein the amino acid positions are relative to the reference sequence corresponding to SEQ ID NO: 2 or 4.

[0170] In some embodiments, the amino acid sequence of the engineered oxalate decarboxylase polypeptide comprises at least a substitution or substitution set 13P/17H/196K, 17H/212S/331V, 17H/26A/196K/212S/226T, 17H/26A/196K/212A/226T/331V, 13P/17H/26A/196K/331V, 17H/60R/196K/226T, 17H/46R/212S, 26A/60V/196K/226T/331V, 17H/46R/196K/212A/274Q/331V, 212S, 17H/196K/226T, 13P/17H/26A/212A/331V, 13P/17H/212S/226T/331V, 196K/212S/331V, 13P/17H/196K/331V, 13P/17H/26A/212A/226T/331V, 17H/60R/196K/212A/226T/331V, 13P/17H/212S, 13P/17H/26A/331V, 13P/17H, 13P/17H/26A/196K, 46R/196K/212S/226T, 17H/60R/196K, 17H/196K/331V, 13P/17H/46R/226T/331V, 17H/196K/226T/331V, 17H/60V/196K/226T, 17H/46R/196K/212S/331V, 13P/17H/212A, 17H/46R/212S/331V, 17H/196K, 13P/17H/212S/226T, 17H/212S, 17H/26A/212S, 13P/17H/226T/A331V, D17H/V196K/212S/331V, 17H/196K/212S/226T/331V, 13P/17H/26A/226T/331V, 46R/60V/196K/226T/331V, 17H/46R/196K/331V, 17H/212A/331V, 13P/17H/46R/196K, 196K/212S, 13P/17H/26A, 17G/83E/263S, 17G/83E/173Q/227E, 17G/227E/301I, 17G/83E/227E/263S, 17G/83E/125E, 17G/83E/173Q, 17G/263S/301I, 17G/125E, 17G/83E/301I, 17G/173Q, 17G/83E/227E, 17G/227E, 17G, 17G/125E/227E, 17G/83E, 17G/263S/301T, 128A, 76S, 141Q, 110V, 79S, 117A, 79G, or 61M, wherein the amino acid positions are relative to the reference sequence corresponding to SEQ ID NO: 2 or 4.

[0171] In some embodiments, the amino acid sequence of the engineered oxalate decarboxylase polypeptide comprises at least a substitution or substitution set at amino acid position(s) 13/17/79, 13/17/79, 13/14/17/60/79, 13/17/79/83, 13/17/79/301, 13/14/17/60/79/212, 17/60/197, 13/60/212, 13/14/17/60/79/83/301, 13/17/60/79, 17/60/301, 14/17/79, 17/60/83, 17/79, 13/17/60/79/83/301, 342, 52/190, 94/190, 190/342/351, 13/79, 13/96, 273, 126, 96, 79, 269, 40, 44, 267, 266, 160, 277, 149, 22, 234, 54, 297, 106, or 13/43, wherein the amino acid positions are relative to the reference sequence corresponding to SEQ ID NO: 2 or 4.

[0172] In some embodiments, the amino acid sequence of the engineered oxalate decarboxylase polypeptide comprises at least a substitution or substitution set 13H/17G/79G, 13H/14V/17G/60V/79G, 13H/17G/79G/83E, 13H/17G/79G/301I, 13H/14V/17G/60V/79G/212S, 17G/60V/197E, 13H/60V/212S, 13H/14V/17G/60V/79G/83E/301I, 13H/17G/60V/79G, 17G/60V/301I, 14V/17G/79G, 17G/60V/83E, 17G/79G, 13H/17G/60V/79G/83E/301I, 342P, 52T/190Q, 94N/190Q, 190Q/342P/351E, 13H/79G, 13H/96L, 273A, 126T, 96K, 79S, 269S, 40S, 96L, 44S, 96R, 79G, 267R, 266V, 160T, 277T, 149T, 22R, 234L, 54L, 297Y, 277A, 106C, or 13H/43C, wherein the amino acid positions are relative to the reference sequence corresponding to SEQ ID NO: 2 or 4.

[0173] In some embodiments, the amino acid sequence of the engineered oxalate decarboxylase polypeptide comprises at least a substitution or substitution set at amino acid position(s) 37, 125, 162, 94, 195, 85, 103, 232, 189, 186, 155, 193, 342, 196, 63, 33, 351, 314, 187, 303, 164, 153, 346, 183, 19, 123, 350, 205, 284, 199, 343, 200, 208, 169, 190, or 121, or combinations thereof, wherein the amino acid positions are relative to the reference sequence corresponding to SEQ ID NO: 2 or 4.

[0174] In some embodiments, the amino acid sequence of the engineered oxalate decarboxylase polypeptide comprises at least a substitution 37G, 125F, 162K, 94T, 195W, 85R, 103S, 232T, 189R, 186N, 155R, 193A, 342A, 196V, 63S, 33R, 351H, 193G, 125S, 314S, 187R, 303T, 103V, 103Q, 155V, 164R, 153S, 37R, 346Q, 346G, 351A, 183K, 19C, 187L, 123S, 85G, 187S, 183C, 123G, 350R, 85E, 205A, 284R, 199V, 346W, 343W, 164V, 200N, 342E, 208G, 169A, 190G, 284A, 199G, 121W, or 196S, wherein the amino acid positions are relative to the reference sequence corresponding to SEQ ID NO: 2 or 4.

[0175] In some embodiments, the amino acid sequence of the engineered oxalate decarboxylase polypeptide comprises at least a substitution or substitution set at amino acid position(s) 14/26/60/318, 14/26/60/94/162/212, 60/162/226, 60, 14/125/162/212/318, 60/125/226, 14/125/162/226, 26/60/162/226/318, 14/26/94/162/212/226, 14/60/162, 14/60/162/226, 14/94/162/318, 14/94/162, 14/60/226, 14/60/94/212, 14/60/162/212, 14/162, 14/94/212/318, 14/60, 14/26/162, 14, 14/318, 14/162/226/318, 14/125/212, 14/125/226/318, 14/26/60/162, 14/125/162/212/226, 14/94/125/162/318, 14/125/226, 277, 166, 233, 83, 5, 342, 96, 284, or 26, wherein the amino acid positions are relative to the reference sequence corresponding to SEQ ID NO: 2 or 4.

[0176] In some embodiments, the amino acid sequence of the engineered oxalate decarboxylase polypeptide comprises at least a substitution or substitution set 14L/26A/60V/318E, 14L/26A/60V/94T/162K/212S, 60V/162K/226T, 60V, 14L/125F/162K/212S/318E, 60V/125F/226T, 14L/125F/162K/226T, 26A/60V/162K/226T/318E, 14L/26A/94T/162K/212S/226T, 14L/60V/162K, 14L/60V/162K/226T, 14L/94T/162K/318E, 14L/94T/162K, 14L/60V/226T, 14L/60V/94T/212S, 14L/60V/162K/212S, 14L/162K, 14L/94T/212S/318E, 14L/60V, 14L/26A/162K, 14L, 14L/318E, 14L/162K/226T/318E, 14L/125F/212S, 14L/125F/226T/318E, 14L/26A/60V/162K, 14L/125F/162K/212S/226T, 14L/94T/125F/162K/318E, 14L/125F/226T, 277R, 277C, 277T, 166R, 233H, 83R, 60M, 277I, 277M, 5S, 342R, 277V, 60R, 96R, 284S, 26R, 26N, or 83W, wherein the amino acid positions are relative to the reference sequence corresponding to SEQ ID NO: 2 or 4.

[0177] In some embodiments, the amino acid sequence of the engineered oxalate decarboxylase polypeptide comprises at least a substitution or substitution set at amino acid position(s) 5/26/83/342, 5/26/277, 5/96/277, 5/83/277/342, 26/83/277, 5/26/83/277, 5/277/342, 5/26/166/277, 83/277/342, 83/96/277/342, 83/96/277, 26/83/277/342, 5/26/83/277/342, 5/83/277, 26/277, 83/277, 5/35/277, 5/26/83/96/277, 5/26/96/277, 5/277, 5/166/277, 26/83/96/277/342, 277, 26/277/342, 5, or 5/83/96/277/342, wherein the amino acid positions are relative to the reference sequence corresponding to SEQ ID NO: 2 or 4.

[0178] In some embodiments, the amino acid sequence of the engineered oxalate decarboxylase polypeptide comprises at least substitution or substitution set 5S/26A/83W/342R, 5S/26A/277T, 5S/96L/277T, 5S/83W/277T/342R, 26A/83W/277T, 5S/26A/83W/277V, 5S/277T/342R, 5S/83W/277V/342R, 5S/26A/166R/277T, 83W/277T/342R, 83R/96L/277V/342R, 83W/96L/277T, 26A/83W/277V/342R, 5S/26A/83W/277V/342R, 5S/83R/277T/342R, 5S/26A/83W/277T/342R, 5S/83R/277V, 26A/277T, 83W/277T, 5S/35V/277T, 5S/26A/83R/96R/277V, 5S/26A/96L/277T, 5S/277T, 5S/26A/83R/277T, 5S/83R/277T, 26A/83R/277V, 5S/26A/277V, 5S/166R/277T, 26A/83W/277V, 26A/83W/96L/277V/342R, 277T, 26A/277T/342R, 83W/277V/342R, 83R/277V, 5S, 26A/277V, 83R/277T, 5S/83W/96R/277T/342R, 5S/277V, 277V, 5S/277V/342R, 83W/96L/277V, or 83W/277V, wherein the amino acid positions are relative to the reference sequence corresponding to SEQ ID NO: 2 or 4.

[0179] In some embodiments, the amino acid sequence of the engineered oxalate decarboxylase polypeptide comprises at least a substitution or substitution set at amino acid position(s) 26, 31, 96, 60, 318, 210, 277, 37, 16, 195, 79, 17, 13, 83, 162, or 174, or combinations thereof, wherein the amino acid positions are relative to the reference sequence corresponding to SEQ ID NO: 2 or 4.

[0180] In some embodiments, the amino acid sequence of the engineered oxalate decarboxylase polypeptide comprises at least a substitution 26L, 31W, 96K, 60R, 318D, 26G, 210R, 31R, 277F, 37M, 96P, 16V, 60A, 26R, 31G, 195G, 318R, 26V, 79M, 16M, 210A, 96R, 37E, 16G, 17W, 13G, 79E, 277T, 60Q, 31L, 96G, 96T, 60G, 16W, 13T, 79R, 26Y, 26S, 195R, 17R, 13V, 277E, 37L, 210G, 60L, 13L, 83Y, 37W, 277G, 83R, 60Y, 210S, 318S, 17I, 37S, 79L, 16R, 195S, 318G, 26C, 13R, 195Y, 60E, 162V, 16C, 96V, 83M, 31M, 174V, 277L, 26M, 318M, 210N, 26A, 277R, 96F, 174G, 16Q, 277A, 13Q, 79F, 16L, 195N, 79V, 17P, 60P, 37P, 96W, 162T, 195M, 318W, 37R, 16T, 210M, 162Y, 16P, 83E, 277M, 174L, 17V, 17E, 17L, 96M, 318V, 174R, 13S, 174T, 13Y, 195A, 277W, 60M, 17A, 318A, 174H, 83S, 277I, 13E, 17K, 26K, 96A, 174D, 210V, 31S, 195C, 79K, 60W, 174S, 13I, 60H, 31E, 96E, 83K, 31Q, 16K, 174M, 37V, 79D, 318T, 195F, 26T, 174Q, 83L, 96I, 13C, 13A, 96Q, 13H, 83T, 31Y, 13W, 277P, 195T, 60S, 26Q, 210P, 174N, 83A, 162E, 37F, 37Q, 31T, 174A, 83F, 60T, 96S, 83V, 210I, 16D, 37C, 83G, 13N, 31V, 79S, 96Y, 17F, 17M, 16A, 83P, 318L, 79Q, 17S, 26W, 195D, 195W, 277S, 174E, 16E, 162F, 79Y, 79A, 17C, 17Y, 195Q, 26P, 195I, 60F, 26I, 17D, 318K, 60N, 16I, 318H, 37A, 195V, 210Y, 195E, 26H, 13D, 31P, 210W, 318P, 83C, 174P, 210T, 17T, 79T, 96H, 79W, 162L, 318E, 31A, 210C, 17N, 195K, 318Y, 17H, 13M, 60D, 277K, 16N, 79C, 13K, 60K, 37N, 60I, 162D, 162I, 16Y, 162S, 96C, 210K, 174I, 210L, 26D, 26N, 210D, 13F, 318N, 277Y, 174W, 31H, 31D, 79N, 37K, 31I, 37H, 318C, 31F, 79P, 195P, 318I, 162A, 277Q, 26F, 277C, 79H, 31C, 79I, 37I, 17Q, 31N, 277N, 37D, 277H, 277D, 96D, 174C, 162P, 318F, 83N, 60C, 83I, 162M, 210H, 195H, 174Y, 37Y, 210Q, 37T, 96N, 83H, 16H, 174F, 83D, 83Q, 162H, 162W, 162N, 16F, 162Q, 162G, 162R, 210F, or 162C, or combinations thereof, wherein the amino acid positions are relative to the reference sequence corresponding to SEQ ID NO: 2 or 4.

[0181] In some embodiments, the amino acid sequence of the engineered oxalate decarboxylase polypeptide comprises at least a substitution or substitution set at amino acid position(s) 174/318, 26/96, 60/318, 31/318, 162/174/318, 174/277/318, 26/195/318, 60/162/195, 60/162/318, 174/195/277, 16/17/174, 60/195/277, 37/277/318, 16/162/195/277, 26/79/83/162, 26/31/60/318, 16/174/195/277, 13/37/83/162, 16/17/60/195, 13/17/37/83, 31/37/162/174/318, 13/16/31/83/162, 16/60/174/195/318, 17/60/96/162/195/277, 13/26/60/83/162/174, 17/31/60/162/174/277, 16/17/26/83/96/277, 17/26/37/174/277/318, 13/16/31/60/162/174, 13/17/31/83/277/318, 13/16/17/31/83/162/318, 13/16/60/83/162/195/318, 13/16/17/31/37/83/96/162, 13/17/26/37/60/83/162/210/318, 13/16/26/31/83/96/162/174/318, 13/16/17/31/60/83/96/162/174/195/318, 13/16/26/37/60/83/162/174/195/210/318, 13/16/37/79/83/96/162/174/195/210/277, 13/17/26/31/37/60/79/83/96/162/174/210, 13/16/17/26/37/79/83/96/174/195/210/318, 13/26/31/37/60/83/96/162/174/195/210/277/318, 13/16/17/31/37/60/79/83/96/162/174/195/210/318, 13/16/17/31/60/79/83/96/162/174/195/210/277/318, 13/16/17/26/37/60/79/96/162/174/195/210/277/318, 13/26/31/37/60/79/83/96/162/174/195/210/277/318, 13/16/17/26/31/37/60/96/162/174/195/210/277/318, 13/16/17/26/31/37/79/83/96/162/174/195/210/318, 13/16/17/26/31/37/60/79/96/162/174/210/277/318, 13/17/26/31/37/60/79/83/96/162/174/195/210/277/318, 13/16/26/31/37/60/79/83/96/162/174/195/210/277/318, 16/17/26/31/37/60/79/83/96/162/174/195/210/277/318, or 13/16/17/26/31/37/60/79/83/96/162/174/195/210/277/318, wherein the amino acid positions are relative to the reference sequence corresponding to SEQ ID NO: 2 or 4.

[0182] In some embodiments, the amino acid sequence of the engineered oxalate decarboxylase polypeptide comprises at least a substitution or substitution set 174D/318E, 26A/96A, 60T/318E, 31E/318E, 162G/174D/318E, 174D/277Y/318E, 26A/195R/318E, 60T/162G/195R, 60T/162G/318E, 174D/195R/277Y, 16A/17D/174D, 60T/195R/277Y, 37K/277Y/318E, 16A/162G/195R/277Y, 26A/79A/83T/162G, 26A/31E/60T/318E, 16A/174D/195R/277Y, 13H/37K/83T/162G, 16A/17D/60T/195R, 13H/17D/37K/83T, 31E/37K/162G/174D/318E, 13H/16A/31E/83T/162G, 16A/60T/174D/195R/318E, 17D/60T/96A/162G/195R/277Y, 13H/26A/60T/83T/162G/174D, 17D/31E/60T/162G/174D/277Y, 16A/17D/26A/83T/96A/277Y, 17D/26A/37K/174D/277Y/318E, 13H/16A/31E/60T/162G/174D, 13H/17D/31E/83T/277Y/318E, 13H/16A/17D/31E/83T/162G/318E, 13H/16A/60T/83T/162G/195R/318E, 13H/16A/17D/31E/37K/83T/96A/162G, 13H/17D/26A/37K/60T/83T/162G/210P/318E, 13H/16A/26A/37K/83T/162G/174D/195R/318E, 13H/16A/26A/31E/83T/96A/162G/174D/318E, 13H/16A/17D/31E/60T/83T/96A/162G/174D/195R/318E, 13H/16A/26A/37K/60T/83T/162G/174D/195R/210P/318E, 13H/16A/37K/79A/83T/96A/162G/174D/195R/210P/277Y, 13H/17D/26A/31E/37K/60T/79A/83T/96A/162G/174D/210P, 13H/16A/17D/26A/37K/79A/83T/96A/174D/195R/210D/318E, 13H/26A/31E/37K/60T/83T/96A/162G/174D/195R/210P/277Y/318E, 13H/16A/17D/31E/37K/60T/79A/83T/96A/162G/174D/195R/210P/318E, 13H/16A/17D/31E/60T/79A/83T/96A/162G/174D/195R/210P/277Y/318E, 13H/16A/17D/26A/37K/60T/79A/96A/162G/174D/195R/210P/277Y/318E, 13H/26A/31E/37K/60T/79A/83T/96A/162G/174D/195R/210P/277Y/318E, 13H/16A/17D/26A/31E/37K/60T/96A/162G/174D/195R/210P/277Y/318E, 13H/16A/17D/26A/31E/37K/79A/83T/96A/162G/174D/195R/210P/318E, 13H/16A/17D/26A/31E/37K/60T/79A/96A/162G/174D/210P/277Y/318E, 13H/17D/26A/31E/37K/60T/79A/83T/96A/162G/174D/195R/210P/277Y/318E, 13H/16A/26A/31E/37K/60T/79A/83T/96A/162G/174D/195R/210P/277Y/318E, 16A/17D/26A/31E/37K/60T/79A/83T/96A/162G/174D/195R/210P/277Y/318E, or 13H/16A/17D/26A/31E/37K/60T/79A/83T/96A/162G/174D/195R/210P/277H/318E, wherein the amino acid positions are relative to the reference sequence corresponding to SEQ ID NO: 2 or 4.

[0183] In some embodiments, the amino acid sequence of the engineered oxalate decarboxylase polypeptide comprises at least a substitution or substitution set at amino acid position(s) 13/31/210/318, 31/210/212/318, 31/124/196/210/226/318, 5/31/210/318, 16/26/31/124/155/195/210/284/318, 31/196/210/226/318, 16/31/155/195/210/226/318, 16/31/195/210/226/318, 16/31/155/174/196/210/318, 31/210, 16/31/195/196/210/318, 16/26/31/124/155/174/196/210/318, 31/195/210/318, 26/31/155/174/210/318, 31/210/316/318, 31/60/210/318, 16/31/155/174/210/318, 16/31/124/174/196/210/318, 16/31/210/226/318, 16/26/31/174/196/210/226/318, 17/31/210/318, 31/210/318/331, 31/124/195/210/318, 16/31/174/196/210/318, 31/188/210/318, 31/195/196/210/318, 31/174/196/210/318, 16/26/31/155/174/210/318, 16/31/155/195/196/210/226/318, 31/195/210/226/284/318, 16/31/210/318, 31/210/240/318, 16/26/31/124/155/195/196/210/226/318, 31/183/210/232/318/339/343, 31/183/206/210/318, 31/63/210/318, 31/173/210/318/347, 16/26/31/174/196/210/318, 16/31/210/284/318, 31/46/210/318, 16/31/124/195/196/210/318, 31/210/274/318, 31/155/174/196/210/318, 31/174/196/210/226/318, 16/31/124/155/174/195/210/318, 16/26/31/155/174/196/210/318, 26/31/174/196/210/284/318, 16/31/195/196/210/284/318, 31/174/210/318, 16/31/124/174/195/210/226/284/318, 16/31/174/195/210/284/318, 26/31/174/196/210/226/284/318, 31/174/196/210/226/284/318, 31/124/174/196/210/318, 26/31/174/195/210/226/318, 31/162/210/318, 16/31/124/195/196/210/284/318, 31/206/210/318/343, 16/26/31/174/195/196/210/226/318, 31/155/195/196/210/226/318, 18/31/210/318, 31/210/318/335, 31/124/155/174/195/210/226/318, 26/31/155/174/195/210/226/318, 31/153/210/318, 31/155/174/195/210/318, 31/174/195/210/284/318, 31/174/195/210/318, 31/37/210/318, 31/124/174/195/210/226/284/318, 31/176/210/318, 16/31/155/174/195/196/210/226/284/318, 10/31/210/318, 31/169/173/210/318, 31/155/210/318, 31/33/210/318, 31/173/183/210/318/343/347, 31/104/210/265/318, or 31/210/233/318, wherein the amino acid positions are relative to the reference sequence corresponding to SEQ ID NO: 2 or 4.

[0184] In some embodiments, the amino acid sequence of the engineered oxalate decarboxylase polypeptide comprises a substitution or substitution set 13P/31K/210A/318Q, 31K/210A/212S/318Q, 31K/124A/196V/210E/226S/318Q, 5S/31K/210A/318Q, 13E/31K/210A/318Q, 16S/26E/31K/124A/155P/195L/210E/284A/318Q, 31K/196V/210A/226S/318Q, 16S/31K/155P/195L/210E/226S/318Q, 16S/31K/195L/210E/226S/318Q, 16S/31K/155P/174K/196V/210A/318Q, 16S/31K/195L/210A/226S/318Q, 13L/31K/210A/318Q, 31K/210A, 16S/31K/195L/196V/210E/318Q, 16S/26E/31K/124A/155P/174K/196V/210E/318Q, 31K/195L/210E/318Q, 26E/31K/155P/174K/210E/318Q, 31K/210A/316V/318Q, 31K/60V/210A/318Q, 16S/31K/155P/174K/210A/318Q, 16S/31K/124A/174K/196V/210A/318Q, 16S/31K/210A/226S/318Q, 16S/26E/31K/174K/196V/210A/226S/318Q, 17H/31K/210A/318Q, 31K/210A/318Q/331V, 31K/124A/195L/210A/318Q, 16S/31K/174K/196V/210A/318Q, 17A/31K/210A/318Q, 31K/188A/210A/318Q, 31K/195L/196V/210E/318Q, 31K/174K/196V/210E/318Q, 5C/31K/210A/318Q, 16S/26E/31K/155P/174K/210A/318Q, 16S/31K/155P/195L/196V/210A/226S/318Q, 31K/195L/210A/226S/284A/318Q, 17N/31K/210A/318Q, 16L/31K/210A/318Q, 31K/210A/240E/318Q, 16S/26E/31K/124A/155P/195L/196V/210A/226S/318Q, 31K/210A/318Q/331P, 31K/183I/210A/232T/318Q/339G/343R, 31K/183I/206M/210A/318Q, 31K/63A/210A/318Q, 31K/173V/210A/318Q/347R, 16S/26E/31K/174K/196V/210A/318Q, 16S/31K/210A/284A/318Q, 31K/60R/210A/318Q, 31K/46R/210A/318Q, 16S/31K/124A/195L/196V/210A/318Q, 31K/210A/274S/318Q, 31K/210A/318Q/331I, 31K/174K/196V/210A/318Q, 31K/155P/174K/196V/210A/318Q, 31K/174K/196V/210A/226S/318Q, 31K/210A/318Q/331L, 16S/31K/124A/155P/174K/195L/210A/318Q, 16S/26E/31K/155P/174K/196V/210A/318Q, 26E/31K/174K/196V/210E/284A/318Q, 31K/210A/212A/318Q, 16S/31K/195L/196V/210A/284A/318Q, 31K/174K/210A/318Q, 16S/31K/124A/174K/195L/210E/226S/284A/318Q, 16S/31K/174K/195L/210A/284A/318Q, 26E/31K/174K/196V/210E/226S/284A/318Q, 31K/210A/212L/318Q, 31K/174K/196V/210A/226S/284A/318Q, 31K/124A/174K/196V/210A/318Q, 26E/31K/174K/195L/210E/226S/318Q, 31K/162A/210A/318Q, 16S/31K/124A/195L/196V/210A/284A/318Q, 31K/206M/210A/318Q/343R, 16S/31K/195L/196V/210A/318Q, 16S/26E/31K/174K/195L/196V/210E/2265/318Q, 31K/155P/195L/196V/210A/226S/318Q, 18Q/31K/210A/318Q, 31K/210A/318Q/335R, 31K/124A/155P/174K/195L/210A/226S/318Q, 17C/31K/210A/318Q, 26E/31K/155P/174K/195L/210A/226S/318Q, 31K/195L/196V/210A/318Q, 31K/162T/210A/318Q, 31K/153H/210A/318Q, 31K/210A/316K/318Q, 31K/155P/174K/195L/210A/318Q, 31K/153Q/210A/318Q, 31K/174K/195L/210E/284A/318Q, 31K/174K/195L/210A/318Q, 31K/153S/210A/318Q, 31K/210A/212F/318Q, 31K/37C/210A/318Q, 31K/210A/212V/318Q, 31K/124A/174K/195L/210A/226S/284A/318Q, 31K/176L/210A/318Q, 16S/31K/155P/174K/195L/196V/210A/226S/284A/318Q, 10Q/31K/210A/318Q, 31K/169G/173V/210A/318Q, 31K/155L/210A/318Q, 18G/31K/210A/318Q, 31K/60L/210A/318Q, 10A/31K/210A/318Q, 18R/31K/210A/318Q, 31K/33R/210A/318Q, 31K/210A/212G/318Q, 10R/31K/210A/318Q, 13R/31K/210A/318Q, 31K/173V/183I/210A/318Q/343R/347R, 16R/31K/210A/318Q, 31K/104Q/210A/265C/318Q, 31K/210A/233R/318Q, or 31K/210A/233D/318Q, wherein the amino acid positions are relative to the reference sequence of SEQ ID NO: 2 or 4.

[0185] In some embodiments, the amino acid sequence of the engineered oxalate decarboxylase polypeptide comprises at least a substitution or substitution set at amino acid position(s) 13/16/17/26/31/174/195/210/226/318, 16/17/26/31/174/195/196/210/212/226/318/331, 16/17/31/174/195/210/212/318, 16/17/31/174/195/210/212/318/331, 13/16/17/31/174/195/210/226/318/331, 16/17/26/31/60/174/195/210/318, 16/17/26/31/46/174/195/196/210/212/226/318, 16/31/60/174/195/210/318/331, 16/17/26/31/46/174/195/210/212/226/274/318/331, 16/26/31/174/195/196/210/212/226/318, 16/17/26/31/174/195/210/318, 13/16/17/31/174/195/196/210/212/226/318/331, 13/16/17/26/31/174/195/196/210/212/318/331, 16/26/31/174/195/210/212/226/318/331, 13/16/17/26/31/174/195/210/226/318/331, 13/16/17/31/174/195/196/210/212/318/331, 16/17/26/31/60/174/195/210/212/318/331, 13/16/17/26/31/174/195/196/210/212/226/318, 13/16/17/31/174/195/196/210/226/318/331, 13/16/17/26/31/174/195/196/210/226/318, 13/16/17/31/174/195/210/226/318, 16/26/31/46/174/195/210/212/318, 16/17/26/31/60/174/195/210/226/318, 16/17/26/31/174/195/210/226/318/331, 13/16/17/26/31/46/174/195/196/210/318/331, 16/17/26/31/174/195/210/318/331, 16/17/26/31/46/174/195/210/212/226/318/331, 16/17/26/31/46/174/195/196/210/212/226/318/331, 16/17/26/31/174/195/210/226/318, 13/16/17/26/31/174/195/196/210/212/318, 16/17/26/31/174/195/196/210/212/226/318, 16/17/31/174/195/196/210/212/226/318, 13/16/17/26/31/174/195/196/210/318/331, 16/17/26/31/174/195/210/212/226/318/331, 16/17/26/31/174/195/210/212/318/331, 13/16/17/31/174/195/196/210/318/331, 16/26/31/46/60/174/195/210/318/331, 16/17/26/31/46/174/195/210/226/318/331, 13/16/17/26/31/46/174/195/210/226/318, 16/26/31/174/195/210/212/226/318, 13/16/17/31/174/195/196/210/226/318, 16/17/26/31/83/174/195/196/210/226/263/318, 16/17/26/31/83/173/174/195/196/210/226/227/318, 16/17/26/31/174/195/196/210/226/227/301/318, 16/17/26/31/83/174/195/196/210/226/227/263/318, 16/17/26/31/83/125/174/195/196/210/226/318, 16/17/26/31/83/173/174/195/196/210/226/318, 16/17/26/31/174/195/196/210/226/263/301/318, 16/17/26/31/125/174/195/196/210/226/318, 16/17/26/31/83/174/195/196/210/226/301/318, 16/17/26/31/173/174/195/196/210/226/318, 16/17/26/31/83/174/195/196/210/226/227/318, 16/17/26/31/174/195/196/210/226/227/318, 16/17/26/31/174/195/196/210/226/318, 16/17/26/31/125/174/195/196/210/226/227/318, 16/17/26/31/83/174/195/196/210/226/318, 16/26/31/128/174/195/196/210/226/318, 16/26/31/76/174/195/196/210/226/318, 16/26/31/141/174/195/196/210/226/318, 16/26/31/110/174/195/196/210/226/318, 16/26/31/79/174/195/196/210/226/318, 16/26/31/117/174/195/196/210/226/318, or 16/26/31/61/174/195/196/210/226/318, wherein the amino acid positions are relative to the reference sequence corresponding to SEQ ID NO: 2 or 4.

[0186] In some embodiments, the amino acid sequence of the engineered oxalate decarboxylase polypeptide comprises at least a substitution or substitution set 13P/16S/17H/26E/31K/174K/195L/210E/226S/318Q, 16S/17H/26E/31K/174K/195L/196V/210E/212S/226S/318Q/331V, 16S/17H/31K/174K/195L/210E/212S/318Q, 16S/17H/31K/174K/195L/210E/212A/318Q/331V, 13P/16S/17H/31K/174K/195L/210E/226S/318Q/331V, 16S/17H/26E/31K/60R/174K/195L/210E/318Q, 16S/17H/26E/31K/46R/174K/195L/196V/210E/212S/226S/318Q, 16S/31K/60V/174K/195L/210E/318Q/331V, 16S/17H/26E/31K/46R/174K/195L/210E/212A/226S/274Q/318Q/331V, 16S/26E/31K/174K/195L/196V/210E/212S/226S/318Q, 16S/17H/26E/31K/174K/195L/210E/318Q, 13P/16S/17H/31K/174K/195L/196V/210E/212A/226S/318Q/331V, 13P/16S/17H/26E/31K/174K/195L/196V/210E/212S/318Q/331V, 16S/26E/31K/174K/195L/210E/212S/226S/318Q/331V, 13P/16S/17H/26E/31K/174K/195L/210E/226S/318Q/331V, 13P/16S/17H/31K/174K/195L/196V/210E/212A/318Q/331V, 16S/17H/26E/31K/60R/174K/195L/210E/212A/318Q/331V, 13P/16S/17H/26E/31K/174K/195L/196V/210E/212S/226S/318Q, 13P/16S/17H/31K/174K/195L/196V/210E/226S/318Q/331V, 13P/16S/17H/26E/31K/174K/195L/196V/210E/226S/318Q, 13P/16S/17H/31K/174K/195L/210E/226S/318Q, 16S/26E/31K/46R/174K/195L/210E/212S/318Q, 16S/17H/26E/31K/60R/174K/195L/210E/226S/318Q, 16S/17H/26E/31K/174K/195L/210E/226S/318Q/331V, 13P/16S/17H/26E/31K/46R/174K/195L/196V/210E/318Q/331V, 16S/17H/26E/31K/174K/195L/210E/318Q/331V, 16S/17H/26E/31K/60V/174K/195L/210E/318Q, 16S/17H/26E/31K/46R/174K/195L/210E/212S/226S/318Q/331V, 13P/16S/17H/26E/31K/174K/195L/196V/210E/212A/226S/318Q, 16S/17H/26E/31K/46R/174K/195L/196V/210E/212S/226S/318Q/331V, 16S/17H/26E/31K/174K/195L/210E/226S/318Q, 13P/16S/17H/26E/31K/174K/195L/196V/210E/212S/318Q, 16S/17H/26E/31K/174K/195L/196V/210E/212S/226S/318Q, 16S/17H/31K/174K/195L/196V/210E/212S/226S/318Q, 13P/16S/17H/26E/31K/174K/195L/196V/210E/318Q/331V, 16S/17H/26E/31K/174K/195L/210E/212S/226S/318Q/331V, 16S/17H/26E/31K/174K/195L/210E/212S/318Q/331V, 13P/16S/17H/31K/174K/195L/196V/210E/318Q/331V, 16S/26E/31K/46R/60V/174K/195L/210E/318Q/331V, 16S/17H/26E/31K/46R/174K/195L/210E/226S/318Q/331V, 16S/17H/26E/31K/174K/195L/196V/210E/212A/226S/318Q/331V, 13P/16S/17H/26E/31K/46R/174K/195L/210E/226S/318Q, 16S/26E/31K/174K/195L/210E/212S/226S/318Q, 13P/16S/17H/31K/174K/195L/196V/210E/226S/318Q, 16S/17G/26E/31K/83E/174K/195L/196V/210E/226S/263S/318Q, 16S/17G/26E/31K/83E/173Q/174K/195L/196V/210E/226S/227E/318Q, 16S/17G/26E/31K/174K/195L/196V/210E/226S/227E/3011/318Q, 16S/17G/26E/31K/83E/174K/195L/196V/210E/226S/227E/263S/318Q, 16S/17G/26E/31K/83E/125E/174K/195L/196V/210E/226S/318Q, 16S/17G/26E/31K/83E/173Q/174K/195L/196V/210E/226S/318Q, 16S/17G/26E/31K/174K/195L/196V/210E/226S/263S/301I/318Q, 16S/17G/26E/31K/125E/174K/195L/196V/210E/226S/318Q, 16S/17G/26E/31K/83E/174K/195L/196V/210E/226S/301I/318Q, 16S/17G/26E/31K/173Q/174K/195L/196V/210E/226S/318Q, 16S/17G/26E/31K/83E/174K/195L/196V/210E/226S/227E/318Q, 16S/17G/26E/31K/174K/195L/196V/210E/226S/227E/318Q, 16S/17G/26E/31K/174K/195L/196V/210E/226S/318Q, 16S/17G/26E/31K/125E/174K/195L/196V/210E/226S/227E/318Q, 16S/17G/26E/31K/83E/174K/195L/196V/210E/226S/318Q, 16S/17G/26E/31K/174K/195L/196V/210E/226S/263S/301T/318Q, 16S/26E/31K/128A/174K/195L/196V/210E/226S/318Q, 16S/26E/31K/76S/174K/195L/196V/210E/226S/318Q, 16S/26E/31K/141Q/174K/195L/196V/210E/226S/318Q, 16S/26E/31K/110V/174K/195L/196V/210E/226S/318Q, 16S/26E/31K/79S/174K/195L/196V/210E/226S/318Q, 16S/26E/31K/117A/174K/195L/196V/210E/226S/318Q, 16S/26E/31K/79G/174K/195L/196V/210E/2265/318Q, or 16S/26E/31K/61M/174K/195L/196V/210E/226S/318Q, wherein the amino acid positions are relative to the reference sequence corresponding to SEQ ID NO: 2 or 4.

[0187] In some embodiments, the amino acid sequence of the engineered oxalate decarboxylase polypeptide comprises at least a substitution or substitution set at amino acid position(s) 16/17/26/31/79/174/195/210/226/318, 14/16/17/26/31/60/79/174/195/210/226/318, 16/17/26/31/79/83/174/195/210/226/318, 16/17/26/31/79/174/195/210/226/301/318, 14/16/17/26/31/60/79/174/195/210/212/226/318, 13/16/17/26/31/60/174/195/197/210/226/318, 16/17/26/31/60/174/195/210/212/226/318, 14/16/17/26/31/60/79/83/174/195/210/226/301/318, 16/17/26/31/60/79/174/195/210/226/318, 13/16/17/26/31/60/174/195/210/226/301/318, 13/14/16/17/26/31/79/174/195/210/226/318, 13/16/17/26/31/60/83/174/195/210/226/318, 13/16/17/26/31/79/174/195/210/226/318, 16/17/26/31/60/79/83/174/195/210/226/301/318, 13/16/17/26/31/174/195/210/226/318/342, 13/16/17/26/31/52/174/190/195/210/226/318, 13/16/17/26/31/94/174/190/195/210/226/318, 13/16/17/26/31/174/190/195/210/226/318/342/351, 16/17/26/31/96/174/195/210/226/318, 13/16/17/26/31/174/195/210/226/273/318, 13/16/17/26/31/126/174/195/210/226/318, 13/16/17/26/31/96/174/195/210/226/318, 13/16/17/26/31/174/195/210/226/269/318, 13/16/17/26/31/40/174/195/210/226/318, 13/16/17/26/31/44/174/195/210/226/318, 13/16/17/26/31/174/195/210/226/267/318, 13/16/17/26/31/174/195/210/226/266/318, 13/16/17/26/31/160/174/195/210/226/318, 13/16/17/26/31/174/195/210/226/277/318, 13/16/17/26/31/149/174/195/210/226/318, 13/16/17/22/26/31/174/195/210/226/318, 13/16/17/26/31/174/195/210/226/234/318, 13/16/17/26/31/54/174/195/210/226/318, 13/16/17/26/31/174/195/210/226/297/318, 13/16/17/26/31/106/174/195/210/226/318, or 16/17/26/31/43/174/195/210/226/318, wherein the amino acid positions are relative to the reference sequence corresponding to SEQ ID NO: 2 or 4.

[0188] In some embodiments, the amino acid sequence of the engineered oxalate decarboxylase polypeptide comprises at least a substitution or substitution set 16S/17G/26E/31K/79G/174K/195L/210E/226S/318Q, 14V/16S/17G/26E/31K/60V/79G/174K/195L/210E/226S/318Q, 16S/17G/26E/31K/79G/83E/174K/195L/210E/226S/318Q, 16S/17G/26E/31K/79G/174K/195L/210E/226S/3011/318Q, 14V/16S/17G/26E/31K/60V/79G/174K/195L/210E/212S/226S/318Q, 13P/16S/17G/26E/31K/60V/174K/195L/197E/210E/226S/318Q, 16S/17H/26E/31K/60V/174K/195L/210E/212S/226S/318Q, 14V/16S/17G/26E/31K/60V/79G/83E/174K/195L/210E/226S/301I/318Q, 16S/17G/26E/31K/60V/79G/174K/195L/210E/226S/318Q, 13P/16S/17G/26E/31K/60V/174K/195L/210E/226S/301I/318Q, 13P/14V/16S/17G/26E/31K/79G/174K/195L/210E/226S/318Q, 13P/16S/17G/26E/31K/60V/83E/174K/195L/210E/226S/318Q, 13P/16S/17G/26E/31K/79G/174K/195L/210E/226S/318Q, 16S/17G/26E/31K/60V/79G/83E/174K/195L/210E/226S/301I/318Q, 13P/16S/17H/26E/31K/174K/195L/210E/226S/318Q/342P, 13P/16S/17H/26E/31K/52T/174K/190Q/195L/210E/226S/318Q, 13P/16S/17H/26E/31K/94N/174K/190Q/195L/210E/226S/318Q, 13P/16S/17H/26E/31K/174K/190Q/195L/210E/226S/318Q/342P/351E, 16S/17H/26E/31K/79G/174K/195L/210E/226S/318Q, 16S/17H/26E/31K/96L/174K/195L/210E/226S/318Q, 13P/16S/17H/26E/31K/174K/195L/210E/226S/273A/318Q, 13P/16S/17H/26E/31K/126T/174K/195L/210E/226S/318Q, 13P/16S/17H/26E/31K/96K/174K/195L/210E/226S/318Q, 13P/16S/17H/26E/31K/79S/174K/195L/210E/226S/318Q, 13P/16S/17H/26E/31K/174K/195L/210E/226S/269S/318Q, 13P/16S/17H/26E/31K/40S/174K/195L/210E/226S/318Q, 13P/16S/17H/26E/31K/96L/174K/195L/210E/226S/318Q, 13P/16S/17H/26E/31K/44S/174K/195L/210E/226S/318Q, 13P/16S/17H/26E/31K/96R/174K/195L/210E/226S/318Q, 13P/16S/17H/26E/31K/79G/174K/195L/210E/226S/318Q, 13P/16S/17H/26E/31K/174K/195L/210E/226S/267R/318Q, 13P/16S/17H/26E/31K/174K/195L/210E/226S/266V/318Q, 13P/16S/17H/26E/31K/160T/174K/195L/210E/226S/318Q, 13P/16S/17H/26E/31K/174K/195L/210E/226S/277T/318Q, 13P/16S/17H/26E/31K/149T/174K/195L/210E/226S/318Q, 13P/16S/17H/22R/26E/31K/174K/195L/210E/226S/318Q, 13P/16S/17H/26E/31K/174K/195L/210E/226S/234L/318Q, 13P/16S/17H/26E/31K/54L/174K/195L/210E/226S/318Q, 13P/16S/17H/26E/31K/174K/195L/210E/226S/297Y/318Q, 13P/16S/17H/26E/31K/174K/195L/210E/226S/277A/318Q, 13P/16S/17H/26E/31K/106C/174K/195L/210E/226S/318Q, or 16S/17H/26E/31K/43C/174K/195L/210E/226S/318Q, wherein the amino acid positions are relative to the reference sequence corresponding to SEQ ID NO: 2 or 4.

[0189] In some embodiments, the amino acid sequence of the engineered oxalate decarboxylase polypeptide comprises at least a substitution or substitution set at amino acid position(s) 13/14/16/17/26/31/37/79/174/195/210/226/318, 13/14/16/17/26/31/79/125/174/195/210/226/318, 13/14/16/17/26/31/79/162/174/195/210/226/318, 13/14/16/17/26/31/79/94/174/195/210/226/318, 13/14/16/17/26/31/79/174/195/210/226/318, 13/14/16/17/26/31/79/85/174/195/210/226/318, 13/14/16/17/26/31/79/103/174/195/210/226/318, 13/14/16/17/26/31/79/174/195/210/226/232/318, 13/14/16/17/26/31/79/174/189/195/210/226/318, 13/14/16/17/26/31/79/174/186/195/210/226/318, 13/14/16/17/26/31/79/155/174/195/210/226/318, 13/14/16/17/26/31/79/174/193/195/210/226/318, 13/14/16/17/26/31/79/174/195/210/226/318/342, 13/14/16/17/26/31/79/174/195/196/210/226/318, 13/14/16/17/26/31/63/79/174/195/210/226/318, 13/14/16/17/26/31/33/79/174/195/210/226/318, 13/14/16/17/26/31/79/174/195/210/226/318/351, 13/14/16/17/26/31/79/174/195/210/226/314/318, 13/14/16/17/26/31/79/174/187/195/210/226/318, 13/14/16/17/26/31/79/174/195/210/226/303/318, 13/14/16/17/26/31/79/164/174/195/210/226/318, 13/14/16/17/26/31/79/153/174/195/210/226/318, 13/14/16/17/26/31/79/174/195/210/226/318/346, 13/14/16/17/26/31/79/174/183/195/210/226/318, 13/14/16/17/19/26/31/79/174/195/210/226/318, 13/14/16/17/26/31/79/123/174/195/210/226/318, 13/14/16/17/26/31/79/174/195/210/226/318/350, 13/14/16/17/26/31/79/174/195/205/210/226/318, 13/14/16/17/26/31/79/174/195/210/226/284/318, 13/14/16/17/26/31/79/174/195/199/210/226/318, 13/14/16/17/26/31/79/174/195/210/226/318/343, 13/14/16/17/26/31/79/174/195/200/210/226/318, 13/14/16/17/26/31/79/174/195/208/210/226/318, 13/14/16/17/26/31/79/169/174/195/210/226/318, 13/14/16/17/26/31/79/174/190/195/210/226/318, or 13/14/16/17/26/31/79/121/174/195/210/226/318, wherein the amino acid positions are relative to the reference sequence corresponding to SEQ ID NO: 2 or 4.

[0190] In some embodiments, the amino acid sequence of the engineered oxalate decarboxylase polypeptide comprises at least a substitution or substitution set 13P/14V/16S/17G/26E/31K/37G/79G/174K/195L/210E/226S/318Q, 13P/14V/16S/17G/26E/31K/79G/125F/174K/195L/210E/226S/318Q, 13P/14V/16S/17G/26E/31K/79G/162K/174K/195L/210E/226S/318Q, 13P/14V/16S/17G/26E/31K/79G/94T/174K/195L/210E/226S/318Q, 13P/14V/16S/17G/26E/31K/79G/174K/195W/210E/226S/318Q, 13P/14V/16S/17G/26E/31K/79G/85R/174K/195L/210E/226S/318Q, 13P/14V/16S/17G/26E/31K/79G/103S/174K/195L/210E/226S/318Q, 13P/14V/16S/17G/26E/31K/79G/174K/195L/210E/226S/232T/318Q, 13P/14V/16S/17G/26E/31K/79G/174K/189R/195L/210E/226S/318Q, 13P/14V/16S/17G/26E/31K/79G/174K/186N/195L/210E/226S/318Q, 13P/14V/16S/17G/26E/31K/79G/155R/174K/195L/210E/226S/318Q, 13P/14V/16S/17G/26E/31K/79G/174K/193A/195L/210E/226S/318Q, 13P/14V/16S/17G/26E/31K/79G/174K/195L/210E/226S/318Q/342A, 13P/14V/16S/17G/26E/31K/79G/174K/195L/196V/210E/226S/318Q, 13P/14V/16S/17G/26E/31K/63S/79G/174K/195L/210E/226S/318Q, 13P/14V/16S/17G/26E/31K/33R/79G/174K/195L/210E/226S/318Q), 13P/14V/16S/17G/26E/31K/79G/174K/195L/210E/226S/318Q/351H, 13P/14V/16S/17G/26E/31K/79G/174K/193G/195L/210E/226S/318Q, 13P/14V/16S/17G/26E/31K/79G/125S/174K/195L/210E/226S/318Q, 13P/14V/16S/17G/26E/31K/79G/174K/195L/210E/226S/314S/318Q, 13P/14V/16S/17G/26E/31K/79G/174K/187R/195L/210E/226S/318Q, 13P/14V/16S/17G/26E/31K/79G/174K/195L/210E/226S/303T/318Q, 13P/14V/16S/17G/26E/31K/79G/103V/174K/195L/210E/226S/318Q, 13P/14V/16S/17G/26E/31K/79G/103Q/174K/195L/210E/226S/318Q, 13P/14V/16S/17G/26E/31K/79G/155V/174K/195L/210E/226S/318Q, 13P/14V/16S/17G/26E/31K/79G/164R/174K/195L/210E/226S/318Q, 13P/14V/16S/17G/26E/31K/79G/153S/174K/195L/210E/226S/318Q, 13P/14V/16S/17G/26E/31K/79G/174K/195L/210E/226S/318Q, 13P/14V/16S/17G/26E/31K/37R/79G/174K/195L/210E/226S/318Q, 13P/14V/16S/17G/26E/31K/79G/174K/195L/210E/226S/318Q/346Q, 13P/14V/16S/17G/26E/31K/79G/174K/195L/210E/226S/318Q/346G, 13P/14V/16S/17G/26E/31K/79G/174K/195L/210E/226S/318Q/351A, 13P/14V/16S/17G/26E/31K/79G/174K/183K/195L/210E/226S/318Q, 13P/14V/16S/17G/19C/26E/31K/79G/174K/195L/210E/226S/318Q, 13P/14V/16S/17G/26E/31K/79G/174K/187L/195L/210E/226S/318Q, 13P/14V/16S/17G/26E/31K/79G/123S/174K/195L/210E/226S/318Q, 13P/14V/16S/17G/26E/31K/79G/85G/174K/195L/210E/226S/318Q, 13P/14V/16S/17G/26E/31K/79G/174K/187S/195L/210E/226S/318Q, 13P/14V/16S/17G/26E/31K/79G/174K/183C/195L/210E/226S/318Q, 13P/14V/16S/17G/26E/31K/79G/123G/174K/195L/210E/226S/318Q, 13P/14V/16S/17G/26E/31K/79G/174K/195L/210E/226S/318Q/350R, 13P/14V/16S/17G/26E/31K/79G/85E/174K/195L/210E/226S/318Q, 13P/14V/16S/17G/26E/31K/79G/174K/195L/205A/210E/226S/318Q, 13P/14V/16S/17G/26E/31K/79G/174K/195L/210E/226S/284R/318Q, 13P/14V/16S/17G/26E/31K/79G/174K/195L/199V/210E/226S/318Q, 13P/14V/16S/17G/26E/31K/79G/174K/195L/210E/226S/318Q/346W, 13P/14V/16S/17G/26E/31K/79G/174K/195L/210E/226S/318Q/343W, 13P/14V/16S/17G/26E/31K/79G/164V/174K/195L/210E/226S/318Q, 13P/14V/16S/17G/26E/31K/79G/174K/195L/200N/210E/226S/318Q, 13P/14V/16S/17G/26E/31K/79G/174K/195L/210E/226S/318Q/342E, 13P/14V/16S/17G/26E/31K/79G/174K/195L/208G/210E/226S/318Q, 13P/14V/16S/17G/26E/31K/79G/169A/174K/195L/210E/226S/318Q, 13P/14V/16S/17G/26E/31K/79G/174K/190G/195L/210E/226S/318Q, 13P/14V/16S/17G/26E/31K/79G/174K/195L/210E/226S/284A/318Q, 13P/14V/16S/17G/26E/31K/79G/174K/195L/199G/210E/226S/318Q, 13P/14V/16S/17G/26E/31K/79G/121W/174K/195L/210E/226S/318Q, or 13P/14V/16S/17G/26E/31K/79G/174K/195L/196S/210E/226S/318Q, wherein the amino acid positions are relative to the reference sequence corresponding to SEQ ID NO: 2 or 4.

[0191] In some embodiments, the amino acid sequence of the engineered oxalate decarboxylase polypeptide comprises at least a substitution or substitution set at amino acid position(s) 13/16/17/31/37/60/79/174/195/210/226, 13/16/17/31/37/60/79/94/162/174/195/210/212/226/318, 13/14/16/17/26/31/37/60/79/162/174/195/210/318, 13/14/16/17/26/31/37/60/79/174/195/210/226/318, 13/16/17/26/31/37/79/125/162/174/195/210/212/226, 13/14/16/17/26/37/60/79/125/174/195/210/318, 13/16/17/26/3/1/7/79/125/162/174/195/210/318, 13/14/16/17/31/37/60/79/162/174/195/210, 13/16/17/31/37/79/94/162/174/195/210/212/318, 13/16/17/26/31/37/60/79/162/174/195/210/226/318, 13/16/17/26/31/37/60/79/162/174/195/210/318, 13/16/17/26/31/37/79/94/162/174/195/210/226, 13/16/17/26/31/37/79/94/162/174/195/210/226/318, 13/16/17/26/31/37/60/79/174/195/210/318, 13/16/17/26/31/37/60/79/94/174/195/210/212/226/318, 13/16/17/26/31/37/60/79/162/174/195/210/212/226/318, 13/16/17/26/31/37/79/162/174/195/210/226/318, 13/16/17/26/31/37/79/94/174/195/210/212/226, 13/16/17/26/31/37/60/79/174/195/210/226/318, 13/16/17/31/37/79/162/174/195/210/226/318, 13/16/17/26/31/37/79/174/195/210/226/318, 13/16/17/26/31/37/79/174/195/210/226, 13/16/17/26/31/37/79/162/174/195/210, 13/16/17/26/31/37/79/125/174/195/210/212/226/318, 13/16/17/26/31/37/79/125/174/195/210, 13/16/17/31/37/60/79/162/174/195/210/226/318, 13/16/17/26/31/37/79/125/162/174/195/210/212/318, 13/16/17/26/31/37/79/94/125/162/174/195/210/226, 13/16/17/26/31/37/79/125/174/195/210/318, 13/14/16/17/26/31/37/79/174/195/210/226/277/318, 13/14/16/17/26/31/37/79/166/174/195/210/226/318, 13/14/16/17/26/31/37/79/174/195/210/226/233/318, 13/14/16/17/26/31/37/79/83/174/195/210/226/318, 5/13/14/16/17/26/31/37/79/174/195/210/226/318, 13/14/16/17/26/31/37/79/174/195/210/226/318/342, 13/14/16/17/26/31/37/79/96/174/195/210/226/318, 13/14/16/17/26/31/37/79/174/195/210/226/284/318, or 13/14/16/17/26/31/37/79/174/195/210/226/318, wherein the amino acid positions are relative to the reference sequence of SEQ ID NO: 2 or 4.

[0192] In some embodiments, the amino acid sequence of the engineered oxalate decarboxylase polypeptide comprises at least a substitution or substitution set 13P/16S/17G/31K/37G/60V/79G/174K/195L/210E/226S, 13P/16S/17G/31K/37G/60V/79G/94T/162K/174K/195L/210E/212S/226S/318Q, 13P/14V/16S/17G/26E/31K/37G/60V/79G/162K/174K/195L/210E/318Q, 13P/14V/16S/17G/26E/31K/37G/60V/79G/174K/195L/210E/226S/318Q, 13P/16S/17G/26E/31K/37G/79G/125F/162K/174K/195L/210E/212S/226S, 13P/14V/16S/17G/26E/31K/37G/60V/79G/125F/174K/195L/210E/318Q, 13P/16S/17G/26E/31K/37G/79G/125F/162K/174K/195L/210E/318Q, 13P/14V/16S/17G/31K/37G/60V/79G/162K/174K/195L/210E, 13P/16S/17G/31K/37G/79G/94T/162K/174K/195L/210E/212S/318Q, 13P/16S/17G/26E/31K/37G/60V/79G/162K/174K/195L/210E/226S/318Q, 13P/16S/17G/26E/31K/37G/60V/79G/162K/174K/195L/210E/318Q, 13P/16S/17G/26E/31K/37G/79G/94T/162K/174K/195L/210E/226S, 13P/16S/17G/26E/31K/37G/79G/94T/162K/174K/195L/210E/226S/318Q, 13P/16S/17G/26E/31K/37G/60V/79G/174K/195L/210E/318Q, 13P/16S/17G/26E/31K/37G/60V/79G/94T/174K/195L/210E/212S/226S/318Q, 13P/16S/17G/26E/31K/37G/60V/79G/162K/174K/195L/210E/212S/226S/318Q, 13P/16S/17G/26E/31K/37G/79G/162K/174K/195L/210E/226S/318Q, 13P/16S/17G/26E/31K/37G/79G/94T/174K/195L/210E/212S/226S, 13P/16S/17G/26E/31K/37G/60V/79G/174K/195L/210E/226S/318Q, 13P/16S/17G/31K/37G/79G/162K/174K/195L/210E/226S/318Q, 13P/16S/17G/26E/31K/37G/79G/174K/195L/210E/226S/318Q, 13P/16S/17G/26E/31K/37G/79G/174K/195L/210E/226S, 13P/16S/17G/26E/31K/37G/79G/162K/174K/195L/210E, 13P/16S/17G/26E/31K/37G/79G/125F/174K/195L/210E/212S/226S/318Q, 13P/16S/17G/26E/31K/37G/79G/125F/174K/195L/210E, 13P/16S/17G/31K/37G/60V/79G/162K/174K/195L/210E/226S/318Q, 13P/16S/17G/26E/31K/37G/79G/125F/162K/174K/195L/210E/212S/318Q, 13P/16S/17G/26E/31K/37G/79G/94T/125F/162K/174K/195L/210E/226S, 13P/16S/17G/26E/31K/37G/79G/125F/174K/1951/210E/318Q, 13P/14V/16S/17G/26E/31K/37G/79G/174K/195L/210E/226S/277R/318Q, 13P/14V/16S/17G/26E/31K/37G/79G/174K/195L/210E/226S/277C/318Q, 13P/14V/16S/17G/26E/31K/37G/79G/174K/195L/210E/226S/277T/318Q, 13P/14V/16S/17G/26E/31K/37G/79G/166R/174K/195L/210E/226S/318Q, 13P/14V/16S/17G/26E/31K/37G/79G/174K/195L/210E/226S/233H/318Q, 13P/14V/16S/17G/26E/31K/37G/79G/83R/174K/195L/210E/226S/318Q, 13P/14V/16S/17G/26E/31K/37G/60M/79G/174K/195L/210E/226S/318Q, 13P/14V/16S/17G/26E/31K/37G/79G/174K/195L/210E/226S/277I/318Q, 13P/14V/16S/17G/26E/31K/37G/79G/174K/195L/210E/226S/277M/318Q, 5S/13P/14V/16S/17G/26E/31K/37G/79G/174K/195L/210E/226S/318Q, 13P/14V/16S/17G/26E/31K/37G/79G/174K/195L/210E/226S/318Q/342R, 13P/14V/16S/17G/26E/31K/37G/79G/174K/195L/210E/2265/277V/318Q, 13P/14V/16S/17G/26E/31K/37G/60R/79G/174K/195L/210E/226S/318Q, 13P/14V/16S/17G/26E/31K/37G/79G/96R/174K/195L/210E/226S/318Q, 13P/14V/16S/17G/26E/31K/37G/79G/174K/195L/210E/226S/284S/318Q, 13P/14V/16S/17G/26R/31K/37G/79G/174K/195L/210E/226S/318Q, 13P/14V/16S/17G/26N/31K/37G/79G/174K/195L/210E/226S/318Q, or 13P/14V/16S/17G/26E/31K/37G/79G/83W/174K/195L/210E/2265/318Q, wherein the amino acid positions are relative to the reference sequence of SEQ ID NO: 2 or 4.

[0193] In some embodiments, the amino acid sequence of the engineered oxalate decarboxylase polypeptide comprises at least a substitution or substitution set at amino acid position(s) 5/13/16/17/31/37/60/79/83/162/174/195/210/318/342, 5/13/16/17/31/37/60/79/162/174/195/210/277/318, 5/13/16/17/26/31/37/60/79/96/162/174/195/210/277/318, 5/13/16/17/26/31/37/60/79/83/162/174/195/210/277/318/342, 13/16/17/31/37/60/79/83/162/174/195/210/277/318, 5/13/16/17/31/37/60/79/83/162/174/195/210/277/318, 5/13/16/17/26/31/37/60/79/162/174/195/210/277/318/342, 5/13/16/17/31/37/60/79/162/166/174/195/210/277/318, 13/16/17/26/31/37/60/79/83/162/174/195/210/277/318/342, 13/16/17/26/31/37/60/79/83/96/162/174/195/210/277/318/342, 13/16/17/31/37/60/79/83/162/174/195/210/277/318/342, 5/13/16/17/31/37/60/79/83/162/174/195/210/277/318/342, 5/13/16/17/26/31/37/60/79/83/162/174/195/210/277/318, 13/16/17/31/37/60/79/162/174/195/210/277/318, 13/16/17/26/31/37/60/79/83/162/174/195/210/277/318, 5/13/16/17/26/31/35/37/60/79/162/174/195/210/277/318, 5/13/16/17/31/37/60/79/83/96/162/174/195/210/277/318, 5/13/16/17/31/37/60/79/96/162/174/195/210/277/318, 5/13/16/17/26/31/37/60/79/162/174/195/210/277/318, 5/13/16/17/26/31/37/60/79/162/166/174/195/210/277/318, 13/16/17/31/37/60/79/83/96/162/174/195/210/277/318/342, 13/16/17/26/31/37/60/79/162/174/195/210/277/318, 13/16/17/31/37/60/79/162/174/195/210/277/318/342, 5/13/16/17/26/31/37/60/79/162/174/195/210/318, 5/13/16/17/26/31/37/60/79/83/96/162/174/195/210/277/318/342, or 13/16/17/26/31/37/60/79/83/96/162/174/195/210/277/318, wherein the amino acid positions are relative to the reference sequence corresponding to SEQ ID NO: 2 or 4.

[0194] In some embodiments, the amino acid sequence of the engineered oxalate decarboxylase comprises at least a substitution or substitution set 5S/13P/16S/17G/31K/37G/60V/79G/83W/162K/174K/195L/210E/318Q/342R, 5S/13P/16S/17G/31K/37G/60V/79G/162K/174K/195L/210E/277T/318Q, 5S/13P/16S/17G/26E/31K/37G/60V/79G/96L/162K/174K/195L/210E/277T/318Q, 5S/13P/16S/17G/26E/31K/37G/60V/79G/83W/162K/174K/195L/210E/277T/318Q/342R, 13P/16S/17G/31K/37G/60V/79G/83W/162K/174K/195L/210E/277T/318Q, 5S/13P/16S/17G/31K/37G/60V/79G/83W/162K/174K/195L/210E/277V/318Q, 5S/13P/16S/17G/26E/31K/37G/60V/79G/162K/174K/195L/210E/277T/318Q/342R, 5S/13P/16S/17G/26E/31K/37G/60V/79G/83W/162K/174K/195L/210E/277V/318Q/342R, 5S/13P/16S/17G/31K/37G/60V/79G/162K/166R/174K/195L/210E/277T/318Q, 13P/16S/17G/26E/31K/37G/60V/79G/83W/162K/174K/195L/210E/277T/318Q/342R, 13P/16S/17G/26E/31K/37G/60V/79G/83R/96L/162K/174K/195L/210E/277V/318Q/342R, 13P/16S/17G/26E/31K/37G/60V/79G/83W/96L/162K/174K/195L/210E/277T/318Q, 13P/16S/17G/31K/37G/60V/79G/83W/162K/174K/195L/210E/277V/318Q/342R, 5S/13P/16S/17G/31K/37G/60V/79G/83W/162K/174K/195L/210E/277V/318Q/342R, 5S/13P/16S/17G/26E/31K/37G/60V/79G/83R/162K/174K/195L/210E/277T/318Q/342R, 5S/13P/16S/17G/31K/37G/60V/79G/83W/162K/174K/195L/210E/277T/318Q/342R, 5S/13P/16S/17G/26E/31K/37G/60V/79G/83R/162K/174K/195L/210E/277V/318Q, 13P/16S/17G/31K/37G/60V/79G/162K/174K/195L/210E/277T/318Q, 13P/16S/17G/26E/31K/37G/60V/79G/83W/162K/174K/195L/210E/277T/318Q, 5S/13P/16S/17G/26E/31K/35V/37G/60V/79G/162K/174K/195L/210E/277T/318Q, 5S/13P/16S/17G/31K/37G/60V/79G/83R/96R/162K/174K/195L/210E/277V/318Q, 5S/13P/16S/17G/31K/37G/60V/79G/96L/162K/174K/195L/210E/277T/318Q, 5S/13P/16S/17G/26E/31K/37G/60V/79G/162K/174K/195L/210E/277T/318Q, 5S/13P/16S/17G/31K/37G/60V/79G/83R/162K/174K/195L/210E/277T/318Q, 5S/13P/16S/17G/26E/31K/37G/60V/79G/83R/162K/174K/195L/210E/277T/318Q, 13P/16S/17G/31K/37G/60V/79G/83R/162K/174K/195L/210E/277V/318Q, 5S/13P/16S/17G/31K/37G/60V/79G/162K/174K/195L/210E/277V/318Q, 5S/13P/16S/17G/26E/31K/37G/60V/79G/162K/166R/174K/195L/210E/277T/318Q, 13P/16S/17G/31K/37G/60V/79G/83W/162K/174K/195L/210E/277V/318Q, 13P/16S/17G/31K/37G/60V/79G/83W/96L/162K/174K/195L/210E/277V/318Q/342R, 13P/16S/17G/26E/31K/37G/60V/79G/162K/174K/195L/210E/277T/318Q, 13P/16S/17G/31K/37G/60V/79G/162K/174K/195L/210E/277T/318Q/342R, 13P/16S/17G/26E/31K/37G/60V/79G/83W/162K/174K/195L/210E/277V/318Q/342R, 13P/16S/17G/26E/31K/37G/60V/79G/83R/162K/174K/195L/210E/277V/318Q, 5S/13P/16S/17G/26E/31K/37G/60V/79G/162K/174K/195L/210E/318Q, 13P/16S/17G/31K/37G/60V/79G/162K/174K/195L/210E/277V/318Q, 13P/16S/17G/26E/31K/37G/60V/79G/83R/162K/174K/195L/210E/277T/318Q, 5S/13P/16S/17G/26E/31K/37G/60V/79G/83W/96R/162K/174K/195L/210E/277T/318Q/342R, 5S/13P/16S/17G/26E/31K/37G/60V/79G/162K/174K/195L/210E/277V/318Q, 13P/16S/17G/26E/31K/37G/60V/79G/162K/174K/195L/210E/277V/318Q, 5S/13P/16S/17G/26E/31K/37G/60V/79G/162K/174K/195L/210E/277V/318Q/342R, 13P/16S/17G/26E/31K/37G/60V/79G/83W/96L/162K/174K/195L/210E/277V/318Q, or 13P/16S/17G/26E/31K/37G/60V/79G/83W/162K/174K/195L/210E/277V/318Q, wherein the amino acid positions are relative to the reference sequence corresponding to SEQ ID NO: 2 or 4.

[0195] In some embodiments, the amino acid sequence of the engineered oxalate decarboxylase polypeptide comprises at least a substitution or substitution set at amino acid position(s) 13/16/17/26/31/37/60/79/83/96/162/174/195/210/277/318, 13/16/17/26/31/37/60/79/83/96/162/174/210/277/318, 13/16/17/3⅓7/60/79/83/96/162/174/195/210/277/318, 13/16/17/26/31/37/60/79/83/162/174/195/210/277/318, 13/16/17/26/31/37/60/79/83/96/162/195/210/277/318, 13/16/17/26/37/60/79/83/96/162/174/195/210/277/318, 16/17/26/31/37/60/79/83/96/162/174/195/210/277/318, 13/16/17/26/31/37/60/79/96/162/174/195/210/277/318, 13/16/17/26/31/37/60/79/83/96/162/174/195/277/318, 13/16/17/26/31/37/79/83/96/162/174/195/210/277/318, 13/17/26/31/37/60/79/83/96/162/174/195/210/277/318, 13/16/17/26/31/37/60/83/96/162/174/195/210/277/318, 13/16/26/31/37/60/79/83/96/162/174/195/210/277/318, 13/16/17/26/31/37/60/79/83/96/162/174/195/210/277, 13/16/17/26/31/37/60/79/83/96/162/174/195/210/318, 13/16/17/26/31/60/79/83/96/162/174/195/210/277/318, or 13/16/17/26/31/37/60/79/83/96/174/195/210/277/318, wherein the amino acid positions are relative to the reference sequence corresponding to SEQ ID NO: 2 or 4.

[0196] In some embodiments, the amino acid sequence of the engineered oxalate decarboxylase polypeptide comprises at least a substitution or substitution set 13P/16S/17G/26E/31K/37G/60V/79G/83W/96L/162K/174K/195L/210E/277V/318Q, 13P/16S/17G/26L/31K/37G/60V/T9G/83W/96L/162K/174K/195L/210E/277V/318Q, 13P/16S/17G/26E/31W/37G/60V/79G/83W/96L/162K/174K/195L/210E/277V/318Q, 13P/16S/17G/26E/31K/37G/60V/79G/83W/96K/162K/174K/195L/210E/277V/318Q, 13P/16S/17G/26E/31K/37G/60R/79G/83W/96L/162K/174K/195L/210E/277V/318Q, 13P/16S/17G/26E/31K/37G/60V/79G/83W/96L/162K/174K/195L/210E/277V/318D, 13P/16S/17G/26G/31K/37G/60V/79G/83W/96L/162K/174K/195L/210E/277V/318Q, 13P/16S/17G/26E/31K/37G/60V/79G/83W/96L/162K/174K/195L/210R/277V/318Q, 13P/16S/17G/26E/31R/37G/60V/79G/83W/96L/162K/174K/195L/210E/277V/318Q, 13P/16S/17G/26E/31K/37G/60V/79G/83W/96L/162K/174K/195L/210E/277F/318Q, 13P/16S/17G/26E/31K/37M/60V/79G/83W/96L/162K/174K/195L/210E/277V/318Q, 13P/16S/17G/26E/31K/37G/60V/79G/83W/96P/162K/174K/195L/210E/277V/318Q, 13P/16V/17G/26E/31K/37G/60V/79G/83W/96L/162K/174K/195L/210E/277V/318Q, 13P/16S/17G/26E/31K/37G/60A/79G/83W/96L/162K/174K/195L/210E/277V/318Q, 13P/16S/17G/26R/31K/37G/60V/79G/83W/96L/162K/174K/195L/210E/277V/318Q, 13P/16S/17G/26E/31G/37G/60V/79G/83W/96L/162K/174K/195L/210E/277V/318Q, 13P/16S/17G/26E/31K/37G/60V/79G/83W/96L/162K/174K/195G/210E/277V/318Q, 13P/16S/17G/26E/31K/37G/60V/79G/83W/96L/162K/174K/195L/210E/277V/318R, 13P/16S/17G/26V/31K/37G/60V/79G/83W/96L/162K/174K/195L/210E/277V/318Q, 13P/16S/17G/26E/31K/37G/60V/79M/83W/96L/162K/174K/195L/210E/277V/318Q, 13P/16M/17G/26E/31K/37G/60V/79G/83W/96L/162K/174K/195L/210E/277V/318Q, 13P/16S/17G/26E/31K/37G/60V/79G/83W/96L/162K/174K/195L/210A/277V/318Q, 13P/16S/17G/26E/31K/37G/60V/79G/83W/96R/162K/174K/195L/210E/277V/318Q, 13P/16S/17G/26E/31K/37E/60V/79G/83W/96L/162K/174K/195L/210E/277V/318Q, 13P/16G/17G/26E/31K/37G/60V/79G/83W/96L/162K/174K/195L/210E/277V/318Q, 13P/16S/17W/26E/31K/37G/60V/79G/83W/96L/162K/174K/195L/210E/277V/318Q, 13G/16S/17G/26E/31K/37G/60V/79G/83W/96L/162K/174K/195L/210E/277V/318Q, 13P/16S/17G/26E/31K/37G/60V/79E/83W/96L/162K/174K/195L/210E/277V/318Q, 13P/16S/17G/26E/31K/37G/60V/79G/83W/96L/162K/174K/195L/210E/277T/318Q, 13P/16S/17G/26E/31K/37G/60Q/79G/83W/96L/162K/174K/195L/210E/277V/318Q, 13P/16S/17G/26E/31L/37G/60V/79G/83W/96L/162K/174K/195L/210E/277V/318Q, 13P/16S/17G/26E/31K/37G/60V/79G/83W/96G/162K/174K/195L/210E/277V/318Q, 13P/16S/17G/26E/31K/37G/60V/79G/83W/96T/162K/174K/195L/210E/277V/318Q, 13P/16S/17G/26E/31K/37G/60G/79G/83W/96L/162K/174K/195L/210E/277V/318Q, 13P/16W/17G/26E/31K/37G/60V/79G/83W/96L/162K/174K/195L/210E/277V/318Q, 13T/16S/17G/26E/31K/37G/60V/79G/83W/96L/162K/174K/195L/210E/277V/318Q, 13P/16S/17G/26E/31K/37G/60V/79R/83W/96L/162K/174K/195L/210E/277V/318Q, 13P/16S/17G/26Y/31K/37G/60V/79G/83W/96L/162K/174K/195L/210E/277V/318Q, 13P/16S/17G/26S/31K/37G/60V/79G/83W/96L/162K/174K/195L/210E/277V/318Q, 13P/16S/17G/26E/31K/37G/60V/79G/83W/96L/162K/174K/210E/277V/318Q, 13P/16S/17R/26E/31K/37G/60V/79G/83W/96L/162K/174K/195L/210E/277V/318Q, 13V/16S/17G/26E/31K/37G/60V/79G/83W/96L/162K/174K/195L/210E/277V/318Q, 13P/16S/17G/26E/31K/37G/60V/79G/83W/96L/162K/174K/195L/210F/277F/318Q, 13P/16S/17G/26E/31K/37L/60V/79G/83W/96L/162K/174K/195L/210E/277V/318Q, 13P/16S/17G/26E/31K/37G/60V/79G/83W/96L/162K/174K/195L/210G/277V/318Q, 13P/16S/17G/26E/31K/37G/60L/79G/83W/96L/162K/174K/195L/210E/277V/318Q, 13L/16S/17G/26E/31K/37G/60V/79G/83W/96L/162K/174K/195L/210E/277V/318Q, 13P/16S/17G/26E/31K/37G/60V/79G/83Y/96L/162K/174K/195L/210E/277V/318Q, 13P/16S/17G/26E/31K/37W/60V/79G/83W/96L/162K/174K/195L/210E/277V/318Q, 13P/16S/17G/26E/31K/37G/60V/79G/83W/96L/162K/174K/195L/210E/277G/318Q, 13P/16S/17G/26E/31K/37G/60V/79G/83R/96L/162K/174K/195L/210E/277V/318Q, 13P/16S/17G/26E/31K/37G/60Y/79G/83W/96L/162K/174K/195L/210E/277V/318Q, 13P/16S/17G/26E/31K/37G/60V/79G/83W/96L/162K/174K/195L/210S/277V/318Q, 13P/16S/17G/26E/31K/37G/60V/79G/83W/96L/162K/174K/195L/210E/277V/318S, 13P/16S/17I/26E/31K/37G/60V/79G/83W/96L/162K/174K/195L/210E/277V/318Q, 13P/16S/17G/26E/31K/37S/60V/79G/83W/96L/162K/174K/195L/210E/277V/318Q, 13P/16S/17G/26E/31K/37G/60V/79L/83W/96L/162K/174K/195L/210E/277V/318Q, 13P/16R/17G/26E/31K/37G/60V/79G/83W/96L/162K/174K/195L/210E/277V/318Q, 13P/16S/17G/26E/31K/37G/60V/79G/83W/96L/162K/174K/195S/210E/277V/318Q, 13P/16S/17G/26E/31K/37G/60V/79G/83W/96L/162K/174K/195L/210E/277V/318G, 13P/16S/17G/26C/31K/37G/60V/79G/83W/96L/162K/174K/195L/210E/277V/318Q, 13R/16S/17G/26E/31K/37G/60V/79G/83W/96L/162K/174K/195L/210E/277V/318Q, 13P/16S/17G/26E/31K/37G/60V/79G/83W/96L/162K/174K/195Y/210E/277V/318Q, 13P/16S/17G/26E/31K/37G/60E/79G/83W/96L/162K/174K/195L/210E/277V/318Q, 13P/16S/17G/26E/31K/37G/60V/79G/83W/96L/162V/174K/195L/210E/277V/318Q, 13P/16C/17G/26E/31K/37G/60V/79G/83W/96L/162K/174K/195L/210E/277V/318Q, 13P/16S/17G/26E/31K/37G/60V/79G/83W/96V/162K/174K/195L/210E/277V/318Q, 13P/16S/17G/26E/31K/37G/60V/79G/83M/96L/162K/174K/195L/210E/277V/318Q, 13P/16S/17G/26E/31M/37G/60V/79G/83W/96L/162K/174K/195L/210E/277V/318Q, 13P/16S/17G/26E/31K/37G/60V/79G/83W/96L/162K/174V/195L/210E/277V/318Q, 13P/16S/17G/26E/31K/37G/60V/79G/83W/96L/162K/174K/195L/210E/277L/318Q, 13P/16S/17G/26M/31K/37G/60V/79G/83W/96L/162K/174K/195L/210E/277V/318Q, 13P/16S/17G/26E/31K/37G/60V/79G/83W/96L/162K/174K/195L/210E/277V/318M, 13P/16S/17G/26E/31K/37G/60V/79G/83W/96L/162K/174K/195L/210N/277V/318Q, 13P/16S/17G/31K/37G/60V/79G/83W/96L/162K/174K/195L/210E/277V/318Q, 13P/16S/17G/26E/31K/37G/60V/79G/83W/96L/162K/174K/195L/210E/277R/318Q, 13P/16S/17G/26E/31K/37G/60V/79G/83W/96F/162K/174K/195L/210E/277V/318Q, 13P/16S/17G/26E/31K/37G/60V/79G/83W/96L/162K/174G/195L/210E/277V/318Q, 13P/16Q/17G/26E/31K/37G/60V/79G/83W/96L/162K/174K/195L/210E/277V/318Q, 13P/16S/17G/26E/31K/37G/60V/79G/83W/96L/162K/174K/195L/210E/277A/318Q, 13Q/16S/17G/26E/31K/37G/60V/79G/83W/96L/162K/174K/195L/210E/277V/318Q, 13P/16S/17G/26E/31K/37G/60V/79F/83W/96L/162K/174K/195L/210E/277V/318Q, 13P/16L/17G/26E/31K/37G/60V/79G/83W/96L/162K/174K/195L/210E/277V/318Q, 13P/16S/17G/26E/31K/37G/60V/79G/83W/96L/162K/174K/195N/210E/277V/318Q, 13P/16S/17G/26E/31K/37G/60V/79V/83W/96L/162K/174K/195L/210E/277V/318Q, 13P/16S/17P/26E/31K/37G/60V/79G/83W/96L/162K/174K/195L/210E/277V/318Q, 13P/16S/17G/26E/31K/37G/60P/79G/83W/96L/162K/174K/195L/210E/277V/318Q, 13P/16S/17G/26E/31K/37P/60V/79G/83W/96L/162K/174K/195L/210E/277V/318Q, 13P/16S/17G/26E/31K/37G/60V/79G/83W/96W/162K/174K/195L/210E/277V/318Q, 13P/16S/17G/26E/31K/37G/60V/79G/83W/96L/162T/174K/195L/210E/277V/318Q, 13P/16S/17G/26E/31K/37G/60V/79G/83W/96L/162K/174K/195M/210E/277V/318Q, 13P/16S/17G/26E/31K/37G/60V/79G/83W/96L/162K/174K/195L/210E/277V/318W, 13P/16S/17G/26E/31K/37R/60V/79G/83W/96L/162K/174K/195L/210E/277V/318Q, 13P/16T/17G/26E/31K/37G/60V/79G/83W/96L/162K/174K/195L/210E/277V/318Q, 13P/16S/17G/26E/31K/37G/60V/79G/83W/96L/162K/174K/195L/210M/277V/318Q, 13P/16S/17G/26E/31K/37G/60V/79G/83W/96L/162Y/174K/195L/210E/277V/318Q, 13P/16P/17G/26E/31K/37G/60V/79G/83W/96L/162K/174K/195L/210E/277V/318Q, 13P/16S/17G/26E/31K/37G/60V/79G/83E/96L/162K/174K/195L/210E/277V/318Q, 13P/16S/17G/26E/31K/37G/60V/79G/83W/96L/162K/174K/195L/210E/277M/318Q, 13P/16S/17G/26E/31K/37G/60V/79G/83W/96L/162K/174L/195L/210E/277V/318Q, 13P/16S/17V/26E/31K/37G/60V/79G/83W/96L/162K/174K/195L/210E/277V/318Q, 13P/16S/17E/26E/31K/37G/60V/79G/83W/96L/162K/174K/195L/210E/277V/318Q, 13P/16S/17L/26E/31K/37G/60V/79G/83W/96L/162K/174K/195L/210E/277V/318Q, 13P/16S/17G/26E/31K/37G/60V/79G/83W/96M/162K/174K/195L/210E/277V/318Q, 13P/16S/17G/26E/31K/37G/60V/79G/83W/96L/162K/174K/195L/210E/277V/318V, 13P/16S/17G/26E/31K/37G/60V/79G/83W/96L/162K/174R/195L/210E/277V/318Q, 13S/16S/17G/26E/31K/37G/60V/79G/83W/96L/162K/174K/195L/210E/277V/318Q, 13P/16S/17G/26E/31K/37G/60V/79G/83W/96L/162K/174T/195L/210E/277V/318Q, 13Y/16S/17G/26E/31K/37G/60V/79G/83W/96L/162K/174K/195L/210E/277V/318Q, 13P/16S/17G/26E/31K/37G/60V/79G/83W/96L/162K/174K/195A/210E/277V/318Q, 13P/16S/17G/26E/31K/37G/60V/79G/83W/96L/162K/174K/195L/210E/277W/318Q, 13P/16S/17G/26E/31K/37G/60M/79G/83W/96L/162K/174K/195L/210E/277V/318Q, 13P/16S/17A/26E/31K/37G/60V/79G/83W/96L/162K/174K/195L/210E/277V/318Q, 13P/16S/17G/26E/31K/37G/60V/79G/83W/96L/162K/174K/195L/210E/277V/318A, 13P/16S/17G/26E/31K/37G/60V/79G/83W/96L/162K/174H/195L/210E/277V/318Q, 13P/16S/17G/26E/31K/37G/60V/79G/83S/96L/162K/174K/195L/210E/277V/318Q, 13P/16S/17G/26E/31K/37G/60V/79G/83W/96L/162K/174K/195L/210E/277I/318Q, 13E/16S/17G/26E/31K/37G/60V/79G/83W/96L/162K/174K/195L/210E/277V/318Q, 13P/16S/17K/26E/31K/37G/60V/79G/83W/96L/162K/174K/195L/210E/277V/318Q, 13P/16S/17G/26K/31K/37G/60V/79G/83W/96L/162K/174K/195L/210E/277V/318Q, 13P/16S/17G/26E/31K/37G/60V/79G/83W/162K/174K/195L/210E/277V/318Q, 13P/16S/17G/26E/31K/37G/60V/79G/83W/96L/162K/195L/210E/277V/318Q, 13P/16S/17G/26E/31K/37G/60V/79G/83W/96L/162K/174K/195L/210V/277V/318Q, 13P/16S/17G/26E/31S/37G/60V/79G/83W/96L/162K/174K/195L/210E/277V/318Q, 13P/16S/17G/26E/31K/37G/60V/79G/83W/96L/162K/174K/195C/210E/277V/318Q, 13P/16S/17G/26E/31K/37G/60V/79K/83W/96L/162K/174K/195L/210E/277V/318Q, 13P/16S/17G/26E/31K/37G/60W/79G/83W/96L/162K/174K/195L/210E/277V/318Q, 13P/16S/17G/26E/31K/37G/60V/79G/83W/96L/162K/174S/195L/210E/277V/318Q, 13I/16S/17G/26E/31K/37G/60V/79G/83W/96L/162K/174K/195L/210E/277V/318Q, 13P/16S/17G/26E/31K/37G/60H/79G/83W/96L/162K/174K/195L/210E/277V/318Q, 13P/16S/17G/26E/37G/60V/79G/83W/96L/162K/174K/195L/210E/277V/318Q, 13P/16S/17G/26E/31K/37G/60V/79G/83W/96E/162K/174K/195L/210E/277V/318Q, 13P/16S/17G/26E/31K/37G/60V/79G/83K/96L/162K/174K/195L/210E/277V/318Q, 13P/16S/17G/26E/31Q/37G/60V/79G/83W/96L/162K/174K/195L/210E/277V/318Q, 13P/16K/17G/26E/31K/37G/60V/79G/83W/96L/162K/174K/195L/210E/277V/318Q, 13P/16S/17G/26E/31K/37G/60V/79G/83W/96L/162K/174M/195L/210E/277V/318Q, 13P/16S/17G/26E/31K/37V/60V/79G/83W/96L/162K/174K/195L/210E/277V/318Q, 13P/16S/17G/26E/31K/37G/60V/79D/83W/96L/162K/174K/195L/210E/277V/318Q, 13P/16S/17G/26E/31K/37G/60V/79G/83W/96L/162K/174K/195L/210E/277V/318T, 13P/16S/17G/26E/31K/37G/60V/79G/83W/96L/162K/174K/195F/210E/277V/318Q, 13P/16S/17G/26T/31K/37G/60V/79G/83W/96L/162K/174K/195L/210E/277V/318Q, 13P/16S/17G/26E/31K/37G/60V/79G/83W/96L/162K/174Q/195L/210E/277V/318Q, 13P/16S/17G/26E/31K/37G/60V/79G/83L/96L/162K/174K/195L/210E/277V/318Q, 13P/16S/17G/26E/31K/37G/60V/79G/83W/96I/162K/174K/195L/210E/277V/318Q, 13C/16S/17G/26E/31K/37G/60V/79G/83W/96L/162K/174K/195L/210E/277V/318Q, 13A/16S/17G/26E/31K/37G/60V/79G/83W/96L/162K/174K/195L/210E/277V/318Q, 13P/16S/17G/26E/31K/37G/60V/79G/83W/96Q/162K/174K/195L/210E/277V/318Q, 16S/17G/26E/31K/37G/60V/79G/83W/96L/162K/174K/195L/210E/277V/318Q, 13P/16S/17G/26E/31K/37G/60V/79G/96L/162K/174K/195L/210E/277V/318Q, 13P/16S/17G/26E/31Y/37G/60V/79G/83W/96L/162K/174K/195L/210E/277V/318Q, 13W/16S/17G/26E/31K/37G/60V/79G/83W/96L/162K/174K/195L/210E/277V/318Q, 13P/16S/17G/26E/31K/37G/60V/79G/83W/96L/162K/174K/195L/210E/277P/318Q, 13P/16S/17G/26E/31K/37G/60V/79G/83W/96L/162K/174K/195T/210E/277V/318Q, 13P/16S/17G/26E/31K/37G/60S/79G/83W/96L/162K/174K/195L/210E/277V/318Q, 13P/16S/17G/26Q/31K/37G/60V/79G/83W/96L/162K/174K/195L/210E/277V/318Q, 13P/16S/17G/26E/31K/37G/60V/79G/83W/96L/162K/174K/195L/277V/318Q, 13P/16S/17G/26E/31K/37G/60V/79G/83W/96L/162K/174N/195L/210E/277V/318Q, 13P/16S/17G/26E/31K/37G/60V/79G/83A/96L/162K/174K/195L/210E/277V/318Q, 13P/16S/17G/26E/31K/37G/60V/79G/83W/96L/162E/174K/195L/210E/277V/318Q, 13P/16S/17G/26E/31K/37F/60V/79G/83W/96L/162K/174K/195L/210E/277V/318Q, 13P/16S/17G/26E/31K/37Q/60V/79G/83W/96L/162K/174K/195L/210E/277V/318Q, 13P/16S/17G/26E/31T/37G/60V/79G/83W/96L/162K/174K/195L/210E/277V/318Q, 13P/16S/17G/26E/31K/37G/60V/79G/83W/96L/162K/174A/195L/210E/277V/318Q, 13P/16S/17G/26E/31K/37G/60V/79G/83F/96L/162K/174K/195L/210E/277V/318Q, 13P/16S/17G/26E/31K/37G/79G/83W/96L/162K/174K/195L/210E/277V/318Q, 13P/16S/17G/26E/31K/37G/60V/79G/83W/96S/162K/174K/195L/210E/277V/318Q, 13P/16S/17G/26E/31K/37G/60V/79G/83V/96L/162K/174K/195L/210E/277V/318Q, 13P/16S/17G/26E/31K/37G/60V/79G/83W/96L/162K/174K/195L/210I/277V/318Q, 13P/16D/17G/26E/31K/37G/60V/79G/83W/96L/162K/174K/195L/210E/277V/318Q, 13P/16S/17G/26E/31K/37C/60V/79G/83W/96L/162K/174K/195L/210E/277V/318Q, 13P/16S/17G/26E/31K/37G/60V/79G/83G/96L/162K/174K/195L/210E/277V/318Q, 13N/16S/17G/26E/31K/37G/60V/79G/83W/96L/162K/174K/195L/210E/277V/318Q, 13P/16S/17G/26E/31V/37G/60V/79G/83W/96L/162K/174K/195L/210E/277V/318Q, 13P/16S/17G/26E/31K/37G/60V/79S/83W/96L/162K/174K/195L/210E/277V/318Q, 13P/16S/17G/26E/31K/37G/60V/79G/83W/96Y/162K/174K/195L/210E/277V/318Q, 13P/16S/17F/26E/31K/37G/60V/79G/83W/96L/162K/174K/195L/210E/277V/318Q, 13P/16S/17M/26E/31K/37G/60V/79G/83W/96L/162K/174K/195L/210E/277V/318Q, 13P/17G/26E/31K/37G/60V/79G/83W/96L/162K/174K/195L/210E/277V/318Q, 13P/16S/17G/26E/31K/37G/60V/79G/83P/96L/162K/174K/195L/210E/277V/318Q, 13P/16S/17G/26E/31K/37G/60V/79G/83W/96L/162K/174K/195L/210E/277V/318L, 13P/16S/17G/26E/31K/37G/60V/79Q/83W/96L/162K/174K/195L/210E/277V/318Q, 13P/16S/17S/26E/31K/37G/60V/79G/83W/96L/162K/174K/195L/210E/277V/318Q, 13P/16S/17G/26W/31K/37G/60V/79G/83W/96L/162K/174K/195L/210E/277V/318Q, 13P/16S/17G/26E/31K/37G/60V/79G/83W/96L/162K/174K/195D/210E/277V/318Q, 13P/16S/17G/26E/31K/37G/60V/79G/83W/96L/162K/174K/195W/210E/277V/318Q, 13P/16S/17G/26E/31K/37G/60V/79G/83W/96L/162K/174K/195L/210E/277S/318Q, 13P/16S/17G/26E/31K/37G/60V/79G/83W/96L/162K/174E/195L/210E/277V/318Q, 13P/16E/17G/26E/31K/37G/60V/79G/83W/96L/162K/174K/195L/210E/277V/318Q, 13P/16S/17G/26E/31K/37G/60V/79G/83W/96L/162F/174K/195L/210E/277V/318Q, 13P/16S/17G/26E/31K/37G/60V/79Y/83W/96L/162K/174K/195L/210E/277V/318Q, 13P/16S/17G/26E/31K/37G/60V/83W/96L/162K/174K/195L/210E/277V/318Q, 13P/16S/17C/26E/31K/37G/60V/79G/83W/96L/162K/174K/195L/210E/277V/318Q, 13P/16S/17Y/26E/31K/37G/60V/79G/83W/96L/162K/174K/195L/210E/277V/318Q, 13P/16S/17G/26E/31K/37G/60V/79G/83W/96L/162K/174K/195Q/210E/277V/318Q, 13P/16S/17G/26P/31K/37G/60V/79G/83W/96L/162K/174K/195L/210E/277V/318Q, 13P/16S/17G/26E/31K/37G/60V/79G/83W/96L/162K/174K/195I/210E/277V/318Q, 13P/16S/17G/26E/31K/37G/60F/79G/83W/96L/162K/174K/195L/210E/277V/318Q, 13P/16S/17G/26I/31K/37G/60V/79G/83W/96L/162K/174K/195L/210E/277V/318Q, 13P/16S/26E/31K/37G/60V/79G/83W/96L/162K/174K/195L/210E/277V/318Q, 13P/16S/17G/26E/31K/37G/60V/79G/83W/96L/162K/174K/195L/210E/277V/318K, 13P/16S/17G/26E/31K/37G/60N/79G/83W/96L/162K/174K/195L/210E/277V/318Q, 13P/16I/17G/26E/31K/37G/60V/79G/83W/96L/162K/174K/195L/210E/277V/318Q, 13P/16S/17G/26E/31K/37G/60V/79G/83W/96L/162K/174K/195L/210E/277V/318H, 13P/16S/17G/26E/31K/37A/60V/79G/83W/96L/162K/174K/195L/210E/277V/318Q, 13P/16S/17G/26E/31K/37G/60V/79G/83W/96L/162K/174K/195V/210E/277V/318Q, 13P/16S/17G/26E/31K/37G/60V/79G/83W/96L/162K/174K/195L/210Y/277V/318Q, 13P/16S/17G/26E/31K/37G/60V/79G/83W/96L/162K/174K/195E/210E/277V/318Q, 13P/16S/17G/26H/31K/37G/60V/79G/83W/96L/162K/174K/195L/210E/277V/318Q, 13D/16S/17G/26E/31K/37G/60V/79G/83W/96L/162K/174K/195L/210E/277V/318Q, 13P/16S/17G/26E/31P/37G/60V/79G/83W/96L/162K/174K/195L/210E/277V/318Q, 13P/16S/17G/26E/31K/37G/60V/79G/83W/96L/162K/174K/195L/210W/277V/318Q, 13P/16S/17G/26E/31K/37G/60V/79G/83W/96L/162K/174K/195L/210E/277V/318P, 13P/16S/17G/26E/31K/37G/60V/79G/83C/96L/162K/174K/195L/210E/277V/318Q, 13P/16S/17G/26E/31K/37G/60V/79G/83W/96L/162K/174P/195L/210E/277V/318Q, 13P/16S/17G/26E/31K/37G/60V/79G/83W/96L/162K/174K/195L/210T/277V/318Q, 13P/16S/17T/26E/31K/37G/60V/79G/83W/96L/162K/174K/195L/210E/277V/318Q, 13P/16S/17G/26E/31K/37G/60V/79T/83W/96L/162K/174K/195L/210E/277V/318Q, 13P/16S/17G/26E/31K/37G/60V/79G/83W/96H/162K/174K/195L/210E/277V/318Q, 13P/16S/17G/26E/31K/37G/60V/79W/83W/96L/162K/174K/195L/210E/277V/318Q, 13P/16S/17G/26E/31K/37G/60V/79G/83W/96L/162L/174K/195L/210E/277V/318Q, 13P/16S/17G/26E/31K/37G/60V/79G/83W/96L/162K/174K/195L/210E/277V, 13P/16S/17G/26E/31A/37G/60V/79G/83W/96L/162K/174K/195L/210E/277V/318Q, 13P/16S/17G/26E/31K/37G/60V/79G/83W/96L/162K/174K/195L/210C/277V/318Q, 13P/16S/17N/26E/31K/37G/60V/79G/83W/96L/162K/174K/195L/210E/277V/318Q, 13P/16S/17G/26E/31K/37G/60V/79G/83W/96L/162K/174K/195K/210E/277V/318Q, 13P/16S/17G/26E/31K/37G/60V/79G/83W/96L/162K/174K/195L/210E/277V/318Y, 13P/16S/17H/26E/31K/37G/60V/79G/83W/96L/162K/174K/195L/210E/277V/318Q, 13M/16S/17G/26E/31K/37G/60V/79G/83W/96L/162K/174K/195L/210E/277V/318Q, 13P/16S/17G/26E/31K/37G/60D/79G/83W/96L/162K/174K/195L/210E/277V/318Q, 13P/16S/17G/26E/31K/37G/60V/79G/83W/96L/162K/174K/195L/210E/277K/318Q, 13P/16N/17G/26E/31K/37G/60V/79G/83W/96L/162K/174K/195L/210E/277V/318Q, 13P/16S/17G/26E/31K/37G/60V/79C/83W/96L/162K/174K/195L/210E/277V/318Q, 13K/165/17G/26E/31K/37G/60V/79G/83W/96L/162K/174K/195L/210E/277V/318Q, 13P/16S/17G/26E/31K/37G/60K/79G/83W/96L/162K/174K/195L/210E/277V/318Q, 13P/16S/17G/26E/31K/37N/60V/79G/83W/96L/162K/174K/195L/210E/277V/318Q, 13P/16S/17G/26E/31K/37G/60I/79G/83W/96L/162K/174K/195L/210E/277V/318Q, 13P/16S/17G/26E/31K/37G/60V/79G/83W/96L/162D/174K/195L/210E/277V/318Q, 13P/16S/17G/26E/31K/37G/60V/79G/83W/96L/162I/174K/195L/210E/277V/318Q, 13P/16Y/17G/26E/31K/37G/60V/79G/83W/96L/162K/174K/195L/210E/277V/318Q, 13P/16S/17G/26E/31K/37G/60V/79G/83W/96L/162S/174K/195L/210E/277V/318Q, 13P/16S/17G/26E/31K/37G/60V/79G/83W/96C/162K/174K/195L/210E/277V/318Q, 13P/16S/17G/26E/31K/37G/60V/79G/83W/96L/162K/174K/195L/210K/277V/318Q, 13P/16S/17G/26E/31K/37G/60V/79G/83W/96L/162K/174I/195L/210E/277V/318Q, 13P/16S/17G/26E/31K/37G/60V/79G/83W/96L/162K/174K/195L/210L/277V/318Q, 13P/16S/17G/26D/31K/37G/60V/79G/83W/96L/162K/174K/195L/210E/277V/318Q, 13P/16S/17G/26N/31K/37G/60V/79G/83W/96L/162K/174K/195L/210E/277V/318Q, 13P/16S/17G/26E/31K/37G/60V/79G/83W/96L/162K/174K/195L/210D/277V/318Q, 13F/16S/17G/26E/31K/37G/60V/79G/83W/96L/162K/174K/195L/210E/277V/318Q, 13P/16S/17G/26E/31K/37G/60V/79G/83W/96L/162K/174K/195L/210E/277V/318N, 13P/16S/17G/26E/31K/37G/60V/79G/83W/96L/162K/174K/195L/210E/318Q, 13P/16S/17G/26E/31K/37G/60V/79G/83W/96L/162K/174W/195L/210E/277V/318Q, 13P/16S/17G/26E/31H/37G/60V/79G/83W/96L/162K/174K/195L/210E/277V/318Q, 13P/16S/17G/26E/31D/37G/60V/79G/83W/96L/162K/174K/195L/210E/277V/318Q, 13P/16S/17G/26E/31K/37G/60V/79N/83W/96L/162K/174K/195L/210E/277V/318Q, 13P/16S/17G/26E/31K/60V/79G/83W/96L/162K/174K/195L/210E/277V/318Q, 13P/16S/17G/26E/31I/37G/60V/79G/83W/96L/162K/174K/195L/210E/277V/318Q, 13P/16S/17G/26E/31K/37H/60V/79G/83W/96L/162K/174K/195L/210E/277V/318Q, 13P/16S/17G/26E/31K/37G/60V/79G/83W/96L/162K/174K/195L/210E/277V/318C, 13P/16S/17G/26E/31F/37G/60V/79G/83W/96L/162K/174K/195L/210E/277V/318Q, 13P/16S/17G/26E/31K/37G/60V/79P/83W/96L/162K/174K/195L/210E/277V/318Q, 13P/16S/17G/26E/31K/37G/60V/79G/83W/96L/162K/174K/195P/210E/277V/318Q, 13P/16S/17G/26E/31K/37G/60V/79G/83W/96L/162K/174K/195L/210E/277V/318I, 13P/16S/17G/26E/31K/37G/60V/79G/83W/96L/162A/174K/195L/210E/277V/318Q, 13P/16S/17G/26E/31K/37G/60V/79G/83W/96L/162K/174K/195L/210E/277Q/318Q, 13P/16S/17G/26F/31K/37G/60V/79G/83W/96L/162K/174K/195L/210E/277V/318Q, 13P/16S/17G/26E/31K/37G/60V/79G/83W/96L/162K/174K/195L/210E/277C/318Q, 13P/16S/17G/26E/31K/37G/60V/79H/83W/96L/162K/174K/195L/210E/277V/318Q, 13P/16S/17G/26E/31C/37G/60V/79G/83W/96L/162K/174K/195L/210E/277V/318Q, 13P/16S/17G/26E/31K/37G/60V/79I/83W/96L/162K/174K/195L/210E/277V/318Q, 13P/16S/17G/26E/31K/37I/60V/79G/83W/96L/162K/174K/195L/210E/277V/318Q, 13P/16S/17Q/26E/31K/37G/60V/79G/83W/96L/162K/174K/195L/210E/277V/318Q, 13P/16S/17G/26E/31N/37G/60V/79G/83W/96L/162K/174K/195L/210E/277V/318Q, 13P/16S/17G/26E/31K/37G/60V/79G/83W/96L/162K/174K/195L/210E/277N/318Q, 13P/16S/17G/26E/31K/37D/60V/79G/83W/96L/162K/174K/195L/210E/277V/318Q, 13P/16S/17G/26E/31K/37G/60V/79G/83W/96L/162K/174K/195L/210E/277H/318Q, 13P/16S/17G/26E/31K/37G/60V/79G/83W/96L/162K/174K/195L/210E/277D/318Q, 13P/16S/17G/26E/31K/37G/60V/79G/83W/96D/162K/174K/195L/210E/277V/318Q, 13P/16S/17G/26E/31K/37G/60V/79G/83W/96L/162K/174C/195L/210E/277V/318Q, 13P/16S/17G/26E/31K/37G/60V/79G/83W/96L/162P/174K/195L/210F/277V/318Q, 13P/16S/17G/26E/31K/37G/60V/79G/83W/96L/162K/174K/195L/210E/277V/318F, 13P/16S/17G/26E/31K/37G/60V/79G/83N/96L/162K/174K/195L/210E/277V/318Q, 13P/16S/17G/26E/31K/37G/60C/79G/83W/96L/162K/174K/195L/210E/277V/318Q, 13P/16S/17G/26E/31K/37G/60V/79G/83I/96L/162K/174K/195L/210E/277V/318Q, 13P/16S/17G/26E/31K/37G/60V/79G/83W/96L/162M/174K/195L/210E/277V/318Q, 13P/16S/17G/26E/31K/37G/60V/79G/83W/96L/162K/174K/195L/210H/277V/318Q, 13P/16S/17G/26E/31K/37G/60V/79G/83W/96L/162K/174K/195H/210E/277V/318Q, 13P/16S/17G/26E/31K/37G/60V/79G/83W/96L/162K/174Y/195L/210E/277V/318Q, 13P/16S/17G/26E/31K/37Y/60V/79G/83W/96L/162K/174K/195L/210E/277V/318Q, 13P/16S/17G/26E/31K/37G/60V/79G/83W/96L/162K/174K/195L/210Q/277V/318Q, 13P/16S/17G/26E/31K/37T/60V/79G/83W/96L/162K/174K/195L/210E/277V/318Q, 13P/16S/17G/26E/31K/37G/60V/79G/83W/96N/162K/174K/195L/210E/277V/318Q, 13P/16S/17G/26E/31K/37G/60V/79G/83H/96L/162K/174K/195L/210E/277V/318Q, 13P/16H/17G/26E/31K/37G/60V/79G/83W/96L/162K/174K/195L/210E/277V/318Q, 13P/16S/17G/26E/31K/37G/60V/79G/83W/96L/162K/174F/195L/210E/277V/318Q, 13P/16S/17G/26E/31K/37G/60V/79G/83D/96L/162K/174K/195L/210E/277V/318Q, 13P/16S/17G/26E/31K/37G/60V/79G/83Q/96L/162K/174K/195L/210E/277V/318Q, 13P/16S/17G/26E/31K/37G/60V/79G/83W/96L/162H/174K/195L/210E/277V/318Q, 13P/16S/17G/26E/31K/37G/60V/79G/83W/96L/162W/174K/195L/210E/277V/318Q, 13P/16S/17G/26E/31K/37G/60V/79G/83W/96L/162N/174K/195L/210E/277V/318Q, 13P/16F/17G/26E/31K/37G/60V/79G/83W/96L/162K/174K/195L/210E/277V/318Q, 13P/16S/17G/26E/31K/37G/60V/79G/83W/96L/162Q/174K/195L/210E/277V/318Q, 13P/16S/17G/26E/31K/37G/60V/79G/83W/96L/174K/195L/210E/277V/318Q, 13P/16S/17G/26E/31K/37G/60V/79G/83W/96L/162R/174K/195L/210E/277V/318Q, 13P/16S/17G/26E/31K/37G/60V/79G/83W/96L/162K/174K/195L/210F/277V/318Q, or 13P/16S/17G/26E/31K/37G/60V/79G/83W/96L/162C/174K/195L/210E/277V/318Q, wherein the amino acid positions are relative to the reference sequence of SEQ ID NO: 2 or 4.

[0197] In some embodiments, the amino acid sequence of the engineered oxalate decarboxylase polypeptide comprises at least a substitution or substitution set at amino acid position(s) 13/16/17/26/31/37/60/79/83/96/162/195/210/277, 13/16/17/31/37/60/79/83/162/174/195/210/277/318, 13/16/17/26/31/37/79/83/96/162/174/195/210/277, 13/16/17/26/37/60/79/83/96/162/174/195/210/277, 13/16/17/26/31/37/60/79/83/96/195/210/277, 13/16/17/26/31/37/60/79/83/96/162/195/210, 13/16/17/31/37/60/79/83/96/162/174/210/277, 13/16/17/26/31/37/79/83/96/174/210/277/318, 13/16/17/26/31/37/79/83/96/174/195/210/277, 13/16/17/26/31/37/60/79/83/96/162/210/318, 13/26/31/37/60/79/83/96/162/195/210/277/318, 13/16/17/26/31/37/79/83/96/162/174/210/318, 13/16/17/26/31/60/79/83/96/162/174/195/210, 13/17/26/31/37/60/79/83/96/174/210/318, 13/16/17/31/37/60/96/174/195/210/277/318, 13/16/17/37/79/83/96/162/174/195/210/277, 13/17/26/31/37/60/79/83/96/162/210/318, 16/17/26/31/60/79/96/174/195/210/277/318, 13/26/31/37/79/83/96/162/174/210/277/318, 16/26/31/60/79/96/162/174/195/210/277/318, 13/16/17/26/60/79/83/96/195/210/277, 17/26/37/60/79/96/174/195/210/277/318, 13/17/26/31/37/79/83/96/162/210/277, 13/16/26/31/37/79/83/174/210/318, 16/17/31/37/79/96/195/210/277/318, 13/16/26/37/79/83/96/195/210/318, 13/31/37/60/79/162/174/195/210/318, 13/16/31/60/79/83/96/162/195/210, 17/26/37/79/83/96/195/210/277/318, 16/26/37/60/79/96/162/174/195/210, 26/37/60/79/96/174/195/210/277, 17/26/31/37/79/96/174/210/277, 26/60/79/174/195/210/277/318, 16/31/79/96/174/195/277, 17/31/60/79/96/210/277, 17/37/60/79/195/210/277, 26/37/79/210/277, 17/31/79/96/277, 17/26/31/60/318, 16/195/277/318, 31/60/162/210/277, 16/17/79, 26/277, 26/37, 31/83, 16/17, 79/83, 60/277, 83/195, 16, 17, 13, or 277, wherein the amino acid positions are relative to the reference sequence of SEQ ID NO: 2 or 4.

[0198] In some embodiments, the amino acid sequence of the engineered oxalate decarboxylase polypeptide comprises at least a substitution or substitution set 13P/16S/17G/26E/31K/37G/60V/79G/83W/96L/162K/195L/210E/277V, 13P/16S/17G/31K/37G/60V/79G/83W/162K/174K/195L/210E/277V/318Q, 13P/16S/17G/26E/31K/37G/79G/83W/96L/162K/174K/195L/210E/277V, 13P/16S/17G/26E/37G/60V/79G/83W/96L/162K/174K/195L/210E/277V, 13P/16S/17G/26E/31K/37G/60V/79G/83W/96L/195L/210E/277V, 13P/16S/17G/26E/31K/37G/60V/79G/83W/96L/162K/195L/210E, 13P/16S/17G/31K/37G/60V/79G/83W/96L/162K/174K/210E/277V, 13P/16S/17G/26E/31K/37G/79G/83W/96L/174K/210E/277V/318Q, 13P/16S/17G/26E/31K/37G/79G/83W/96L/174K/195L/210E/277V, 13P/16S/17G/26E/31K/37G/60V/79G/83W/96L/162K/210E/318Q, 13P/26E/31K/37G/60V/79G/83W/96L/162K/195L/210E/277V/318Q, 13P/16S/17G/26E/31K/37G/79G/83W/96L/162K/174K/210E/318Q, 13P/16S/17G/26E/31K/60V/79G/83W/96L/162K/174K/195L/210E, 13P/17G/26E/31K/37G/60V/79G/83W/96L/174K/210E/318Q, 13P/16S/17G/31K/37G/60V/96L/174K/195L/210E/277V/318Q, 13P/16S/17G/37G/79G/83W/96L/162K/174K/195L/210E/277V, 13P/17G/26E/31K/37G/60V/79G/83W/96L/162K/210E/318Q, 16S/17G/26E/31K/60V/79G/96L/174K/195L/210E/277V/318Q, 13P/26E/31K/37G/79G/83W/96L/162K/174K/210E/277V/318Q, 16S/26E/31K/60V/79G/96L/162K/174K/195L/210E/277V/318Q, 13P/16S/17G/26E/60V/79G/83W/96L/195L/210E/277V, 17G/26E/37G/60V/79G/96L/174K/195L/210E/277V/318Q, 13P/17G/26E/31K/37G/79G/83W/96L/162K/210E/277V, 13P/16S/26E/31K/37G/79G/83W/174K/210E/318Q, 16S/17G/31K/37G/79G/96L/195L/210E/277V/318Q, 13P/16S/26E/37G/79G/83W/96L/195L/210E/318Q, 13P/31K/37G/60V/79G/162K/174K/195L/210E/318Q, 13P/16S/31K/60V/79G/83W/96L/162K/195L/210E, 17G/26E/37G/79G/83W/96L/195L/210E/277V/318Q, 16S/26E/37G/60V/79G/96L/162K/174K/195L/210E, 26E/37G/60V/79G/96L/174K/195L/210E/277V, 17G/26E/31K/37G/79G/96L/174K/210E/277V, 26E/60V/79G/174K/195L/210E/277V/318Q, 16S/31K/79G/96L/174K/195L/277V, 17G/31K/60V/79G/96L/210E/277V, 17G/37G/60V/79G/195L/210E/277V, 26E/37G/79G/210E/277V, 17G/31K/79G/96L/277V, 17G/26E/31K/60V/318Q, 16S/195L/277V/318Q, 31K/60V/162K/210D/277V, 16S/17G/79G, 26E/277V, 26E/37G, 31K/83W, 16S/17G, 79G/83W, 60V/277V, 83W/195L, 16S, 17G, 13P, or 277H, wherein the amino acid positions are relative to the reference sequence of SEQ ID NO: 2 or 4.

[0199] In some embodiments, the amino acid sequence of the engineered oxalate decarboxylase polypeptide comprises at least a substitution at an amino acid position set forth in Tables 4-1, 4-2, 4-3, 4-4, 4-5, 4-6, 4-7, 5-1, and 5-2, wherein the amino acid positions are relative to SEQ ID NO: 2 or 4.

[0200] In some embodiments, the amino acid sequence of the engineered oxalate decarboxylase polypeptide comprises at least a substitution set forth in Tables 4-1, 4-2, 4-3, 4-4, 4-5, 4-6, 4-7, 5-1, and 5-2, wherein the amino acid positions are relative to the reference sequence corresponding to SEQ ID NO: 2 or 4.

[0201] In some embodiments, the amino acid sequence of the engineered oxalate decarboxylase polypeptide comprises at least a substitution or substitution set at amino acid position(s) set forth in Tables 4-1, 4-2, 4-3, 4-4, 4-5, 4-6, 4-7, 5-1, and 5-2, wherein the amino acid positions are relative to the reference sequence corresponding to SEQ ID NO: 2 or 4.

[0202] In some embodiments, the amino acid sequence of the engineered oxalate decarboxylase polypeptide comprises at least a substitution or substitution set of an engineered oxalate decarboxylase polypeptide set forth in any of Tables 4-1, 4-2, 4-3, 4-4, 4-5, 4-6, 4-7, 5-1, and 5-2, wherein the amino acid positions are relative to SEQ ID NO: 2 or 4.

[0203] In some embodiments, the engineered oxalate decarboxylase polypeptide comprises an amino acid sequence having at least 70%, 75%, 80%, 81%, 82%, 83%, 84%, 85%, 86%, 87%, 88%, 89%, 90%, 91%, 92%, 93%, 94%, 95%, 96%, 97%, 98%, 99%, or more sequence identity to the reference sequence corresponding to SEQ ID NO: 172, 320, 396, 616, 670, 750, or 906, or to the reference sequence corresponding to residues 1-359 of SEQ ID NO: 172, 320, or 396.

[0204] In some embodiments, the engineered oxalate decarboxylase polypeptide comprises an amino acid sequence having at least 70%, 75%, 80%, 81%, 82%, 83%, 84%, 85%, 86%, 87%, 88%, 89%, 90%, 91%, 92%, 93%, 94%, 95%, 96%, 97%, 98%, 99%, or more sequence identity to the reference sequence corresponding to residues 1-359 of an even-numbered SEQ ID NO. of SEQ ID NOs: 28-614, a reference sequence corresponding to an even-numbered SEQ ID NO. of SEQ ID NOs: 28-614, or a reference sequence corresponding to an even-numbered SEQ ID NO. of SEQ ID NOs: 616-1622.

[0205] In some embodiments, the engineered oxalate decarboxylase polypeptide comprises an amino acid sequence having at least 770%, 75%, 80%, 81%, 82%, 83%, 84%, 85%, 86%, 87%, 88%, 89%, 90%, 91%, 92%, 93%, 94%, 95%, 96%, 97%, 98%, 99%, or more sequence identity to a reference sequence corresponding to SEQ ID NO: 172, 320, 396, 616, 670, 750, or 906, or relative to the reference sequence corresponding to residues 1-359 of SEQ ID NO: 172, 320, or 396.

[0206] In some embodiments, it includes the proviso that the engineered oxalate decarboxylase polypeptide does not include the amino acid sequence corresponding to SEQ ID NO: 2. In some embodiments, the amino acid sequence of the engineered oxalate decarboxylase polypeptide comprises one or more substitutions relative to the reference sequence corresponding to SEQ ID NO: 172, 320, 396, 616, 670, 750, or 906, or relative to the reference sequence corresponding to residues 1-359 of SEQ ID NO: 172, 320, or 396.

[0207] In some embodiments, the engineered oxalate decarboxylase polypeptide comprises an amino acid sequence having at least 70%, 75%, 80%, 81%, 82%, 83%, 84%, 85%, 86%, 87%, 88%, 89%, 90%, 91%, 92%, 93%, 94%, 95%, 96%, 97%, 98%, 99%, or more sequence identity to a reference sequence corresponding to an even-numbered SEQ ID NO. of SEQ ID NOs: 28-1622, or to a reference sequence corresponding to residues 1-359 of an even-numbered SEQ ID NO. of SEQ ID NOs: 28-614, wherein the amino acid sequence comprises one or more substitutions relative to the reference sequence corresponding to SEQ ID NO: 172, 320, 396, 616, 670, 750, or 906, or relative to the reference sequence corresponding to residues 1-359 of SEQ ID NO: 172, 320, or 396.

[0208] In some embodiments, the engineered oxalate decarboxylase polypeptide comprising an amino acid sequence having at least 70%, 75%, 80%, 81%, 82%, 83%, 84%, 85%, 86%, 87%, 88%, 89%, 90%, 91%, 92%, 93%, 94%, 95%, 96%, 97%, 98%, 99%, or more sequence identity to a reference sequence corresponding to SEQ ID NO: 172, 320, 396, 616, 670, 750, or 906, or to a reference sequence corresponding to residues 1-359 of SEQ ID NO: 172, 320, or 396, wherein the amino acid sequence comprises one or more substitutions relative to the reference sequence corresponding to SEQ ID NO: 172, 320, 396, 616, 670, 750, or 906, or relative to the reference sequence corresponding to residues 1-359 of SEQ ID NO: 172, 320, or 396.

[0209] In some embodiments, the amino acid sequence of the engineered oxalate decarboxylase polypeptide comprises at least a substitution at amino acid position 4, 5, 6, 7, 10, 11, 13, 14, 16, 17, 18, 19, 22, 26, 31, 33, 35, 37, 40, 43, 44, 46, 52, 54, 60, 61, 62, 63, 76, 79, 80, 82, 83, 85, 94, 96, 97, 103, 104, 106, 110, 117, 121, 123, 124, 125, 126, 128, 141, 149, 153, 155, 156, 160, 162, 164, 166, 169, 173, 174, 176, 180, 182, 183, 186, 187, 188, 189, 190, 193, 195, 196, 197, 199, 200, 205, 206, 208, 210, 212, 216, 219, 226, 227, 232, 233, 234, 240, 242, 243, 263, 265, 266, 267, 269, 270, 273, 274, 277, 284, 297, 301, 303, 304, 314, 316, 318, 331, 335, 339, 342, 343, 346, 347, 350, 351, 356, or 359, or combinations thereof, wherein the amino acid sequence comprises one or more substitutions relative to the reference sequence corresponding to SEQ ID NO: 172, 320, 396, 616, 670, 750, or 906, or relative to the reference sequence corresponding to residues 1-359 of SEQ ID NO: 172, 320, or 396.

[0210] In some embodiments, the amino acid sequence of the engineered oxalate decarboxylase polypeptide comprises at least a substitution or amino acid residue 4C/R/S, 5C/S, 6A/S/W, 7G, 10A/Q/R, 11R, 13A/C/D/E/F/G/H/I/K/L/M/N/P/Q/R/S/T/V/W/Y, 14L/V, 16A/C/D/E/F/G/H/I/K/L/M/N/P/Q/R/S/T/V/W/Y, 17A/C/D/E/F/G/H/I/K/L/M/N/P/Q/R/S/T/V/W/Y, 18G/Q/R, 19C, 22R, 26A/C/D/E/F/G/H/I/K/L/M/N/P/Q/R/S/T/V/W/Y, 31A/C/D/E/F/G/H/I/K/L/M/N/P/Q/R/S/T/V/W/Y, 33R, 35V, 37A/C/D/E/F/G/H/I/K/L/M/N/P/Q/R/S/T/V/W/Y, 40S, 43C, 44S, 46R, 52T, 54L, 60A/C/D/E/F/G/H/I/K/L/M/N/P/Q/R/S/T/V/W/Y, 61M, 62G, 63A/S, 76S, 79A/C/D/E/F/G/H/I/K/L/M/N/P/Q/R/S/T/V/W/Y, 80L, 82I, 83A/C/D/E/F/G/H/I/K/L/M/N/P/Q/R/S/T/V/W/Y, 85E/G/R, 94N/T, 96A/C/D/E/F/G/H/I/K/L/M/N/P/Q/R/S/T/V/W/Y, 97T, 103Q/S/V, 104Q, 106C, 110V, 117A, 121W, 123G/Q/S, 124A/C/G/Q/R/T, 125E/F/S, 126T, 128A, 141Q, 149T, 153H/Q/S, 155L/P/R/V, 156E, 160T, 162A/C/D/E/F/G/H/I/K/L/M/N/P/Q/R/S/T/V/W/Y, 164R/V, 166R, 169A/G/L, 173Q/V, 174A/C/D/E/F/G/H/I/K/L/M/N/P/Q/R/S/T/V/W/Y, 176L, 180E, 182R, 183C/E/I/K, 186N, 187L/R/S, 188A, 189R, 190G/Q, 193A/G, 195A/C/D/E/F/G/H/I/K/L/M/N/P/Q/R/S/T/V/W/Y, 196F/K/M/R/S/V, 197E, 199G/V, 200N, 205A, 206M, 208G, 210A/C/D/E/F/G/H/I/K/L/M/N/P/Q/R/S/T/V/W/Y, 212A/F/G/L/S/V, 216S/W, 219V, 226S/T, 227E/S, 232T, 233D/H/R, 234L, 240E, 242D, 243V, 263S, 265C, 266V, 267R, 269S, 270L, 273A, 274Q/S, 277A/C/D/E/F/G/H/I/K/L/M/N/P/Q/R/S/T/V/W/Y, 284A/R/S, 297Y, 3011/Q/T, 303T, 304D/G, 314S, 316K/V, 318A/C/D/E/F/G/H/I/K/L/M/N/P/Q/R/S/T/V/W/Y, 331I/L/P/V, 335R, 339G, 342A/E/P/R, 343R/W, 346G/L/Q/W, 347F/R, 350R, 351A/E/H, 356S, or 359L/W, or combinations thereof, wherein the amino acid positions are relative to the reference sequence corresponding to residues SEQ ID NO: 172, 320, 396, 616, 670, 750, or 906, or relative to the reference sequence corresponding to residues 1-359 of SEQ ID NO: 172, 320, or 396.

[0211] In some embodiments, the amino acid sequence of the engineered oxalate decarboxylase polypeptide comprises at least a substitution at amino acid position 13, 14, 16, 17, 26, 31, 37, 60, 79, 83, 96, 162, 174, 195, 196, 210, 226, 277, 301, or 318, or combinations thereof, wherein the amino acid positions are relative to the reference sequence corresponding to residues SEQ ID NO: 172, 320, 396, 616, 670, 750, or 906, or relative to the reference sequence corresponding to residues 1-359 of SEQ ID NO: 172, 320, or 396.

[0212] In some embodiments, the amino acid sequence of the engineered oxalate decarboxylase polypeptide comprises at least a substitution or amino acid residue 13A/C/D/E/F/G/H/I/K/L/M/N/P/Q/R/S/T/V/W/Y, 14L/V, 16A/C/D/E/F/G/H/I/K/L/M/N/P/Q/R/S/T/V/W/Y, 17A/C/D/E/F/G/H/I/K/L/M/N/P/Q/R/S/T/V/W/Y, 26A/C/D/E/F/G/H/I/K/L/M/N/P/Q/R/S/T/V/W/Y, 31A/C/D/E/F/G/H/I/K/L/M/N/P/Q/R/S/T/V/W/Y, 37A/C/D/E/F/G/H/I/K/L/M/N/P/Q/R/S/T/V/W/Y, 60A/C/D/E/F/G/H/I/K/L/M/N/P/Q/R/S/T/V/W/Y, 79A/C/D/E/F/G/H/I/K/L/M/N/P/Q/R/S/T/V/W/Y, 83A/C/D/E/F/G/H/I/K/L/M/N/P/Q/R/S/T/V/W/Y, 96A/C/D/E/F/G/H/I/K/L/M/N/P/Q/R/S/T/V/W/Y, 162A/C/D/E/F/G/H/I/K/L/M/N/P/Q/R/S/T/V/W/Y, 174A/C/D/E/F/G/H/I/K/L/M/N/P/Q/R/S/T/V/W/Y, 195A/C/D/E/F/G/H/I/K/L/M/N/P/Q/R/S/T/V/W/Y, 196F/K/M/R/S/V, 210A/C/D/E/F/G/H/I/K/L/M/N/P/Q/R/S/T/V/W/Y, 226S/T, 277A/C/D/E/F/G/H/I/K/L/M/N/P/Q/R/S/T/V/W/Y, 301I/Q/T, or 318A/C/D/E/F/G/H/I/K/L/M/N/P/Q/R/S/T/V/W/Y, or combinations thereof, wherein the amino acid positions are relative to the reference sequence corresponding to SEQ ID NO: 172, 320, 396, 616, 670, 750, or 906, or relative to the reference sequence corresponding to residues 1-359 of SEQ ID NO: 172, 320, or 396.

[0213] In some embodiments, the amino acid sequence of the engineered oxalate decarboxylase polypeptide comprises at least a substitution 13P, 14L, 16S, 17H/G, 26E, 31K, 37G, 60V, 79G, 83W, 96L, 162K, 174K, 195L, 196V, 210A/E, 226S, 277V, 301I, or 318Q, or combinations thereof, wherein the amino acid positions are relative to the reference sequence corresponding to SEQ ID NO: 172, 320, 396, 616, 670, 750, or 906, or relative to the reference sequence corresponding to residues 1-359 of SEQ ID NO: 172, 320, or 396.

[0214] In some embodiments, the amino acid sequence of the engineered oxalate decarboxylase polypeptide comprises at least a substitutions at amino acid position 31, 210, or 318, or combinations thereof, wherein the amino acid positions are relative to the reference sequence corresponding to SEQ ID NO: 172, 320, 396, 616, 670, 750, or 906, or relative to the reference sequence corresponding to residues 1-359 of SEQ ID NO: 172, 320, or 396.

[0215] In some embodiments, the amino acid sequence of the engineered oxalate decarboxylase polypeptide comprises at least a substitution 31K, 210A/E, or 318Q, or combinations thereof, wherein the amino acid positions are relative to the reference sequence corresponding to SEQ ID NO: 172, 320, 396, 616, 670, 750, or 906, or relative to the reference sequence corresponding to residues 1-359 of SEQ ID NO: 172, 320, or 396.

[0216] In some embodiments, the engineered oxalate decarboxylase polypeptide comprises an amino acid sequence having at least 70%, 75%, 80%, 81%, 82%, 83%, 84%, 85%, 86%, 87%, 88%, 89%, 90%, 91%, 92%, 93%, 94%, 95%, 96%, 97%, 98%, 99%, or more sequence identity to the reference sequence corresponding to residues 1-359 of SEQ ID NO: 172, or to the reference sequence corresponding to SEQ ID NO: 172, wherein the amino acid sequence comprises one or more amino acid substitutions relative to the reference sequence corresponding to residues 1-359 of SEQ ID NO: 172, or relative to the reference sequence corresponding SEQ ID NO: 172.

[0217] In some embodiments, the amino acid sequence of the engineered oxalate decarboxylase polypeptide comprises at least a substitution or substitution set at amino acid position(s) 13, 212, 124/196/210/226, 5, 16/26/124/155/195/210/284, 196/226, 16/155/195/210/226, 16/195/210/226, 16/155/174/196, 16/195/226, 318, 16/195/196/210, 16/26/124/155/174/196/210, 195/210, 26/155/174/210, 316, 60, 16/155/174, 16/124/174/196, 16/226, 16/26/174/196/226, 17, 331, 124/195, 16/174/196, 188, 195/196/210, 174/196/210, 16/26/155/174, 16/155/195/196/226, 195/226/284, 16, 240, 16/26/124/155/195/196/226, 183/232/339/343, 183/206, 63, 173/347, 16/26/174/196, 16/284, 46, 16/124/195/196, 274, 174/196, 155/174/196, 174/196/226, 16/124/155/174/195, 16/26/155/174/196, 26/174/196/210/284, 16/195/196/284, 174, 16/124/174/195/210/226/284, 16/174/195/284, 26/174/196/210/226/284, 174/196/226/284, 124/174/196, 26/174/195/210/226, 162, 16/124/195/196/284, 206/343, 16/195/196, 16/26/174/195/196/210/226, 155/195/196/226, 18, 335, 124/155/174/195/226, 26/155/174/195/226, 195/196, 153, 155/174/195, 174/195/210/284, 174/195, 37, 124/174/195/226/284, 176, 16/155/174/195/196/226/284, 10, 169/173, 155, 33, 173/183/343/347, 104/265, or 233, wherein the amino acid positions are relative to the reference sequence corresponding to residues 1-359 of SEQ ID NO: 172, or relative to the reference sequence corresponding SEQ ID NO: 172.

[0218] In some embodiments, the amino acid sequence of the engineered oxalate decarboxylase polypeptide comprises at least a substitution or substitution set 13P, 212S, 124A/196V/210E/226S, 5S, 13E, 16S/26E/124A/155P/195L/210E/284A, 196V/226S, 16S/155P/195L/210E/226S, 16S/195L/210E/226S, 16S/155P/174K/196V, 16S/195L/226S, 13L, 318E, 16S/195L/196V/210E, 16S/26E/124A/155P/174K/196V/210E, 195L/210E, 26E/155P/174K/210E, 316V, 60V, 16S/155P/174K, 16S/124A/174K/196V, 16S/226S, 16S/26E/174K/196V/226S, 17H, 331V, 124A/195L, 16S/174K/196V, 17A, 188A, 195L/196V/210E, 174K/196V/210E, 5C, 16S/26E/155P/174K, 16S/155P/195L/196V/226S, 195L/226S/284A, 17N, 16L, 240E, 16S/26E/124A/155P/195L/196V/226S, 331P, 1831/232T/339G/343R, 183I/206M, 63A, 173V/347R, 16S/26E/174K/196V, 16S/284A, 60R, 46R, 16S/124A/195L/196V, 274S, 331I, 174K/196V, 155P/174K/196V, 174K/196V/226S, 331L, 16S/124A/155P/174K/195L, 16S/26E/155P/174K/196V, 26E/174K/196V/210E/284A, 212A, 16S/195L/196V/284A, 174K, 16S/124A/174K/195L/210E/226S/284A, 16S/174K/195L/284A, 26E/174K/196V/210E/226S/284A, 212L, 174K/196V/226S/284A, 124A/174K/196V, 26E/174K/195L/210E/226S, 162A, 16S/124A/195L/196V/284A, 206M/343R, 16S/195L/196V, 16S/26E/174K/195L/196V/210E/226S, 155P/195L/196V/226S, 18Q, 335R, 124A/155P/174K/195L/226S, 17C, 26E/155P/174K/195L/226S, 195L/196V, 162T, 153H, 316K, 155P/174K/195L, 153Q, 174K/195L/210E/284A, 174K/195L, 153S, 212F, 37C, 212V, 124A/174K/195L/226S/284A, 176L, 16S/155P/174K/195L/196V/226S/284A, 10Q, 169G/173V, 155L, 18G, 60L, 10A, 18R, 33R, 212G, 10R, 13R, 173V/1831/343R/347R, 16R, 104Q/265C, 233R, or 233D, wherein the amino acid positions are relative to the reference sequence corresponding to residues 1-359 of SEQ ID NO: 172, or relative to the reference sequence corresponding SEQ ID NO: 172.

[0219] In some embodiments, the amino acid sequence of the engineered oxalate decarboxylase polypeptide comprises at least a substitution or substitution set H13P, H212S, K124A/K196V/A210E/T226S, T5S, H13E, A16S/A26E/K124A/A155P/R195L/A210E/K284A, K196V/T226S, A16S/A155P/R195L/A210E/T226S, A16S/R195L/A210E/T226S, A16S/A155P/D174K/K196V, A16S/R195L/T226S, H13L, Q318E, A16S/R195L/K196V/A210E, A16S/A26E/K124A/A155P/D174K/K196V/A210E, R195L/A210E, A26E/A155P/D174K/A210E, N316V, T60V, A16S/A155P/D174K, A16S/K124A/D174K/K196V, A16S/T226S, A16S/A26E/D174K/K196V/T226S, D17H, A331V, K124A/R195L, A16S/D174K/K196V, D17A, P188A, R195L/K196V/A210E, D174K/K196V/A210E, T5C, A16S/A26E/A155P/D174K, A16S/A155P/R195L/K196V/T226S, R195L/T226S/K284A, D17N, A16L, D240E, A16S/A26E/K124A/A155P/R195L/K196V/T226S, A331P, V183I/K232T/S339G/S343R, V183I/L206M, P63A, K173V/K347R, A16S/A26E/D174K/K196V, A16S/K284A, T60R, V46R, A16S/K124A/R195L/K196V, H274S, A331I, D174K/K196V, A155P/D174K/K196V, D174K/K196V/T226S, A331L, A16S/K124A/A155P/D174K/R195L, A16S/A26E/A155P/D174K/K196V, A26E/D174K/K196V/A210E/K284A, H212A, A16S/R195L/K196V/K284A, D174K, A16S/K124A/D174K/R195L/A210E/T226S/K284A, A16S/D174K/R195L/K284A, A26E/D174K/K196V/A210E/T226S/K284A, H212L, D174K/K196V/T226S/K284A, K124A/D174K/K196V, A26E/D174K/R195L/A210E/T226S, G162A, A16S/K124A/R195L/K196V/K284A, L206M/S343R, A16S/R195L/K196V, A16S/A26E/D174K/R195L/K196V/A210E/T226S, A155P/R195L/K196V/T226S, K18Q, A335R, K124A/A155P/D174K/R195L/T226S, D17C, A26E/A155P/D174K/R195L/T226S, R195L/K196V, G162T, P153H, N316K, A155P/D174K/R195L, P153Q, D174K/R195L/A210E/K284A, D174K/R195L, P153S, H212F, K37C, H212V, K124A/D174K/R195L/T226S/K284A, V176L, A16S/A155P/D174K/R195L/K196V/T226S/K284A, V10Q, D169G/K173V, A155L, K18G, T60L, V10A, K18R, K33R, H212G, V10R, H13R, K173V/V183I/S343R/K347R, A16R, P104Q/N265C, T233R, or T233D, wherein the amino acid positions are relative to the reference sequence corresponding to residues 1-359 of SEQ ID NO: 172, or relative to the reference sequence corresponding SEQ ID NO: 172.

[0220] In some embodiments, the engineered oxalate decarboxylase polypeptide comprises an amino acid sequence having at least 70%, 75%, 80%, 81%, 82%, 83%, 84%, 85%, 86%, 87%, 88%, 89%, 90%, 91%, 92%, 93%, 94%, 95%, 96%, 97%, 98%, 99%, or more sequence identity to the reference sequence corresponding to residues 1-359 of SEQ ID NO: 320, or to the reference sequence corresponding to SEQ ID NO: 320, wherein the amino acid sequence comprises one or more amino acid substitutions relative to the reference sequence corresponding to residues 1-359 of SEQ ID NO: 320, or relative to the reference sequence corresponding to SEQ ID NO: 320.

[0221] In some embodiments, the amino acid sequence of the engineered oxalate decarboxylase polypeptide comprises at least a substitution or substitution set at amino acid position(s) 13/17/196, 17/212/331, 17/26/196/212/226, 17/26/196/212/226/331, 13/17/26/196/331, 17/60/196/226, 17/46/212, 26/60/196/226/331, 17/46/196/212/274/331, 212, 17/196/226, 13/17/26/212/331, 13/17/212/226/331, 196/212/331, 13/17/196/331, 13/17/26/212/226/331, 17/60/196/212/226/331, 13/17/212, 13/17/26/331, 13/17, 13/17/26/196, 46/196/212/226, 17/60/196, 17/196/331, 13/17/46/226/331, 17/196/226/331, 17/46/196/212/331, 17/46/212/331, 17/196, 13/17/212/226, 17/212, 17/26/212, 13/17/226/331, 17/196/212/331, 17/196/212/226/331, 13/17/26/226/331, 46/60/196/226/331, 17/46/196/331, 13/17/46/196, 196/212, 13/17/26, 17/83/263, 17/83/173/227, 17/227/301, 17/83/227/263, 17/83/125, 17/83/173, 17/263/301, 17/125, 17/83/301, 17/173, 17/83/227, 17/227, 17, 17/125/227, 17/83, 128, 76, 141, 110, 79, 117, or 61, wherein the amino acid positions are relative to the reference sequence corresponding to residues 1-359 of SEQ ID NO: 320, or relative to the reference sequence corresponding to SEQ ID NO: 320.

[0222] In some embodiments, the amino acid sequence of the engineered oxalate decarboxylase polypeptide comprises at least a substitution or substitution set 13P/17H/196K, 17H/212S/331V, 17H/26A/196K/212S/226T, 17H/26A/196K/212A/226T/331V, 13P/17H/26A/196K/331V, 17H/60R/196K/226T, 17H/46R/212S, 26A/60V/196K/226T/331V, 17H/46R/196K/212A/274Q/331V, 212S, 17H/196K/226T, 13P/17H/26A/212A/331V, 13P/17H/212S/226T/331V, 196K/212S/331V, 13P/17H/196K/331V, 13P/17H/26A/212A/226T/331V, 17H/60R/196K/212A/226T/331V, 13P/17H/212S, 13P/17H/26A/331V, 13P/17H, 13P/17H/26A/196K, 46R/196K/212S/226T, 17H/60R/196K, 17H/196K/331V, 13P/17H/46R/226T/331V, 17H/196K/226T/331V, 17H/60V/196K/226T, 17H/46R/196K/212S/331V, 13P/17H/212A, 17H/46R/212S/331V, 17H/196K, 13P/17H/212S/226T, 17H/212S, 17H/26A/212S, 13P/17H/226T/A331V, D17H/V196K/212S/331V, 17H/196K/212S/226T/331V, 13P/17H/26A/226T/331V, 46R/60V/196K/226T/331V, 17H/46R/196K/331V, 17H/212A/331V, 13P/17H/46R/196K, 196K/212S, 13P/17H/26A, 17G/83E/263S, 17G/83E/173Q/227E, 17G/227E/301I, 17G/83E/227E/263S, 17G/83E/125E, 17G/83E/173Q, 17G/263S/301I, 17G/125E, 17G/83E/301I, 17G/173Q, 17G/83E/227E, 17G/227E, 17G, 17G/125E/227E, 17G/83E, 17G/263S/301T, 128A, 76S, 141Q, 110V, 79S, 117A, 79G, or 61M, wherein the amino acid positions are relative to the reference sequence corresponding to residues 1-359 of SEQ ID NO: 320, or relative to the reference sequence corresponding to SEQ ID NO: 320.

[0223] In some embodiments, the amino acid sequence of the engineered oxalate decarboxylase polypeptide comprises at least a substitution or substitution set H13P/D17H/V196K, D17H/H212S/A331V, D17H/E26A/V196K/H212S/S226T, D17H/E26A/V196K/H212A/S226T/A331V, H13P/D17H/E26A/V196K/A331V, D17H/T60R/V196K/S226T, D17H/V46R/H212S, E26A/T60V/V196K/S226T/A331V, D17H/V46R/V196K/H212A/H274Q/A331V, H212S, D17H/V196K/S226T, H13P/D17H/E26A/H212A/A331V, H13P/D17H/H212S/S226T/A331V, V196K/H212S/A331V, H13P/D17H/V196K/A331V, H13P/D17H/E26A/H212A/S226T/A331V, D17H/T60R/V196K/H212A/S226T/A331V, H13P/D17H/H212S, H13P/D17H/E26A/A331V, H13P/D17H, H13P/D17H/E26A/V196K, V46R/V196K/H212S/S226T, D17H/T60R/V196K, D17H/V196K/A331V, H13P/D17H/V46R/S226T/A331V, D17H/V196K/S226T/A331V, D17H/T60V/V196K/S226T, D17H/V46R/V196K/H212S/A331V, H13P/D17H/H212A, D17H/V46R/H212S/A331V, D17H/V196K, H13P/D17H/H212S/S226T, D17H/H212S, D17H/E26A/H212S, H13P/D17H/S226T/A331V, D17H/V196K/H212S/A331V, D17H/V196K/H212S/S226T/A331V, H13P/D17H/E26A/S226T/A331V, V46R/T60V/V196K/S226T/A331V, D17H/V46R/V196K/A331V, D17H/H212A/A331V, H13P/D17H/V46R/V196K, V196K/H212S, H13P/D17H/E26A, D17G/T83E/D263S, D17G/T83E/K173Q/R227E, D17G/R227E/V301I, D17G/T83E/R227E/D263S, D17G/T83E/P125E, D17G/T83E/K173Q, D17G/D263S/V301I, D17G/P125E, D17G/T83E/V301I, D17G/K173Q, D17G/T83E/R227E, D17G/R227E, D17G, D17G/P125E/R227E, D17G/T83E, D17G/D263S/V301T, F128A, A76S, G141Q, F110V, A79S, M117A, A79G, or L61M, wherein the amino acid positions are relative to the reference sequence corresponding to residues 1-359 of SEQ ID NO: 320, or relative to the reference sequence corresponding to SEQ ID NO: 320.

[0224] In some embodiments, the engineered oxalate decarboxylase polypeptide comprises an amino acid sequence having at least 70%, 75%, 80%, 81%, 82%, 83%, 84%, 85%, 86%, 87%, 88%, 89%, 90%, 91%, 92%, 93%, 94%, 95%, 96%, 97%, 98%, 99%, or more sequence identity to the reference sequence corresponding to residues 1-359 of SEQ ID NO: 396, or to the reference sequence corresponding to SEQ ID NO:396, wherein the amino acid sequence comprises one or more amino acid substitutions relative to the reference sequence corresponding to residues 1-359 of SEQ ID NO: 396, or relative to the reference sequence corresponding to SEQ ID NO: 396.

[0225] In some embodiments, the amino acid sequence of the engineered oxalate decarboxylase polypeptide comprises at least a substitution or substitution set at amino acid position(s) 13/17/79, 13/14/17/60/79, 13/17/79/83, 13/17/79/301, 13/14/17/60/79/212, 17/60/197, 13/60/212, 13/14/17/60/79/83/301, 13/17/60/79, 17/60/301, 14/17/79, 17/60/83, 17/79, 13/17/60/79/83/301, 342, 52/190, 94/190, 190/342/351, 13/79, 13/96, 273, 126, 96, 79, 269, 40, 44, 267, 266, 160, 277, 149, 22, 234, 54, 297, 106, or 13/43, wherein the amino acid positions are relative to the reference sequence corresponding to residues 1-359 of SEQ ID NO: 396, or relative to the reference sequence corresponding to SEQ ID NO: 396.

[0226] In some embodiments, the amino acid sequence of the engineered oxalate decarboxylase polypeptide comprises at least a substitution or substitution set 13H/17G/79G, 13H/14V/17G/60V/79G, 13H/17G/79G/83E, 13H/17G/79G/301I, 13H/14V/17G/60V/79G/212S, 17G/60V/197E, 13H/60V/212S, 13H/14V/17G/60V/79G/83E/301I, 13H/17G/60V/79G, 17G/60V/301I, 14V/17G/79G, 17G/60V/83E, 17G/79G, 13H/17G/60V/79G/83E/301I, 342P, 52T/190Q, 94N/190Q, 190Q/342P/351E, 13H/79G, 13H/96L, 273A, 126T, 96K, 79S, 269S, 40S, 96L, 44S, 96R, 79G, 267R, 266V, 160T, 277T, 149T, 22R, 234L, 54L, 297Y, 277A, 106C, or 13H/43C, wherein the amino acid positions are relative to the reference sequence corresponding to residues 1-359 of SEQ ID NO: 396, or relative to the reference sequence corresponding to SEQ ID NO: 396.

[0227] In some embodiments, the amino acid sequence of the engineered oxalate decarboxylase polypeptide comprises at least a substitution or substitution set P13H/H17G/A79G, P13H/L14V/H17G/T60V/A79G, P13H/H17G/A79G/T83E, P13H/H17G/A79G/V301I, P13H/L14V/H17G/T60V/A79G/H212S, H17G/T60V/L197E, P13H/T60V/H212S, P13H/L14V/H17G/T60V/A79G/T83E/V301I, P13H/H17G/T60V/A79G, H17G/T60V/V301I, L14V/H17G/A79G, H17G/T60V/T83E, H17G/A79G, P13H/H17G/T60V/A79G/T83E/V301I, T342P, K52T/A190Q, Q94N/A190Q, A190Q/T342P/Q351E, P13H/A79G, P13H/A96L, S273A, A126T, A96K, A79S, T269S, G40S, A96L, T44S, A96R, A79G, S267R, I266V, N160T, Y277T, I149T, T22R, V234L, I54L, S297Y, Y277A, D106C, or P13H/A43C, wherein the amino acid positions are relative to the reference sequence corresponding to residues 1-359 of SEQ ID NO: 396, or relative to the reference sequence corresponding to SEQ ID NO: 396.

[0228] In some embodiments, the engineered oxalate decarboxylase polypeptide comprises an amino acid sequence having at least 70%, 75%, 80%, 81%, 82%, 83%, 84%, 85%, 86%, 87%, 88%, 89%, 90%, 91%, 92%, 93%, 94%, 95%, 96%, 97%, 98%, 99%, or more sequence identity to the reference sequence corresponding to SEQ ID NO: 670, wherein the amino acid sequence comprises one or more amino acid substitutions relative to the reference sequence corresponding to residues 1-359 of SEQ ID NO: 670, or the reference sequence corresponding to SEQ ID NO: 670.

[0229] In some embodiments, the amino acid sequence of the engineered oxalate decarboxylase polypeptide comprises at least a substitution at amino acid position 37, 125, 162, 94, 195, 85, 103, 232, 189, 186, 155, 193, 342, 196, 63, 33, 351, 314, 187, 303, 164, 153, 346, 183, 19, 123, 350, 205, 284, 199, 343, 200, 208, 169, 190, or 121, or combinations thereof, wherein the amino acid positions are relative to the reference sequence corresponding SEQ ID NO: 670.

[0230] In some embodiments, the amino acid sequence of the engineered oxalate decarboxylase polypeptide comprises at least a substitution 37G, 125F, 162K, 94T, 195W, 85R, 103S, 232T, 189R, 186N, 155R, 193A, 342A, 196V, 63S, 33R, 351H, 193G, 125S, 314S, 187R, 303T, 103V, 103Q, 155V, 164R, 153S, 37R, 346Q, 346G, 351A, 183K, 19C, 187L, 123S, 85G, 187S, 183C, 123G, 350R, 85E, 205A, 284R, 199V, 346W, 343W, 164V, 200N, 342E, 208G, 169A, 190G, 284A, 199G, 121W, or 196S, or combinations thereof, wherein the amino acid positions are relative to the reference sequence corresponding to SEQ ID NO: 670.

[0231] In some embodiments, the amino acid sequence of the engineered oxalate decarboxylase polypeptide comprises a substitution K37G, P125F, G162K, Q94T, L195W, H85R, G103S, K232T, A189R, A186N, A155R, Q193A, T342A, K196V, P63S, K33R, Q351H, Q193G, P125S, T314S, T187R, D303T, G103V, G103Q, A155V, P164R, P153S, K37R, E346Q, E346G, Q351A, V183K, D19C, T187L, D123S, H85G, T187S, V183C, D123G, K350R, H85E, E205A, K284R, P199V, E346W, S343W, P164V, L200N, T342E, E208G, D169A, A190G, K284A, P199G, L121W, or K196S, or combinations thereof, wherein the amino acid positions are relative to the reference sequence corresponding to SEQ ID NO: 670.

[0232] In some embodiments, the engineered oxalate decarboxylase polypeptide comprises an amino acid sequence having at least 70%, 75%, 80%, 81%, 82%, 83%, 84%, 85%, 86%, 87%, 88%, 89%, 90%, 91%, 92%, 93%, 94%, 95%, 96%, 97%, 98%, 99%, or more sequence identity to the reference sequence corresponding to SEQ ID NO: 616, wherein the amino acid sequence comprises one or more amino acid substitutions relative to the reference sequence corresponding to SEQ ID NO: 616.

[0233] In some embodiments, the amino acid sequence of the engineered oxalate decarboxylase polypeptide comprises at least a substitution or substitution set at amino acid position(s) 14/26/60/318, 14/26/60/94/162/212, 60/162/226, 60, 14/125/162/212/318, 60/125/226, 14/125/162/226, 26/60/162/226/318, 14/26/94/162/212/226, 14/60/162, 14/60/162/226, 14/94/162/318, 14/94/162, 14/60/226, 14/60/94/212, 14/60/162/212, 14/162, 14/94/212/318, 14/60, 14/26/162, 14, 14/318, 14/162/226/318, 14/125/212, 14/125/226/318, 14/26/60/162, 14/125/162/212/226, 14/94/125/162/318, 14/125/226, 277, 166, 233, 83, 5, 342, 96, 284, or 26, wherein the amino acid positions are relative to the reference sequence corresponding SEQ ID NO: 616.

[0234] In some embodiments, the amino acid sequence of the engineered oxalate decarboxylase polypeptide comprises at least a substitution or substitution set 14L/26A/60V/318E, 14L/26A/60V/94T/162K/212S, 60V/162K/226T, 60V, 14L/125F/162K/212S/318E, 60V/125F/226T, 14L/125F/162K/226T, 26A/60V/162K/226T/318E, 14L/26A/94T/162K/212S/226T, 14L/60V/162K, 14L/60V/162K/226T, 14L/94T/162K/318E, 14L/94T/162K, 14L/60V/226T, 14L/60V/94T/212S, 14L/60V/162K/212S, 14L/162K, 14L/94T/212S/318E, 14L/60V, 14L/26A/162K, 14L, 14L/318E, 14L/162K/226T/318E, 14L/125F/212S, 14L/125F/226T/318E, 14L/26A/60V/162K, 14L/125F/162K/212S/226T, 14L/94T/125F/162K/318E, 14L/125F/226T, 277R, 277C, 277T, 166R, 233H, 83R, 60M, 277I, 277M, 5S, 342R, 277V, 60R, 96R, 284S, 26R, 26N, or 83W, wherein the amino acid positions are relative to the reference sequence corresponding to SEQ ID NO: 616.

[0235] In some embodiments, the amino acid sequence of the engineered oxalate decarboxylase polypeptide comprises at least a substitution or substitution set V14L/E26A/T60V/Q318E, V14L/E26A/T60V/Q94T/G162K/H212S, T60V/G162K/S226T, T60V, V14L/P125F/G162K/H212S/Q318E, T60V/P125F/S226T, V14L/P125F/G162K/S226T, E26A/T60V/G162K/S226T/Q318E, V14L/E26A/Q94T/G162K/H212S/S226T, V14L/T60V/G162K, V14L/T60V/G162K/S226T, V14L/Q94T/G162K/Q318E, V14L/Q94T/G162K, V14L/T60V/S226T, V14L/T60V/Q94T/H212S, V14L/T60V/G162K/H212S, V14L/G162K, V14L/Q94T/H212S/Q318E, V14L/T60V, V14L/E26A/G162K, V14L, V14L/Q318E, V14L/G162K/S226T/Q318E, V14L/P125F/H212S, V14L/P125F/S226T/Q318E, V14L/E26A/T60V/G162K, V14L/P125F/G162K/H212S/S226T, V14L/Q94T/P125F/G162K/Q318E, V14L/P125F/S226T, Y277R, Y277C, Y277T, S166R, T233H, T83R, T60M, Y277I, Y277M, T5S, T342R, Y277V, T60R, A96R, K284S, E26R, E26N, or T83W, wherein the amino acid positions are relative to the reference sequence corresponding to SEQ ID NO: 616.

[0236] In some embodiments, the engineered oxalate decarboxylase polypeptide comprises an amino acid sequence having at least 70%, 75%, 80%, 81%, 82%, 83%, 84%, 85%, 86%, 87%, 88%, 89%, 90%, 91%, 92%, 93%, 94%, 95%, 96%, 97%, 98%, 99%, or more sequence identity to the reference sequence corresponding to SEQ ID NO: 750, wherein the amino acid sequence comprises one or more amino acid substitutions relative to the reference sequence corresponding to SEQ ID NO: 750.

[0237] In some embodiments, the engineered oxalate decarboxylase polypeptide comprises at least a substitution or substitution set at amino acid position(s) 5/26/83/342, 5/26/277, 5/96/277, 5/83/277/342, 26/83/277, 5/26/83/277, 5/277/342, 5/26/166/277, 83/277/342, 83/96/277/342, 83/96/277, 26/83/277/342, 5/26/83/277/342, 5/83/277, 26/277, 83/277, 5/35/277, 5/26/83/96/277, 5/26/96/277, 5/277, 5/166/277, 26/83/96/277/342, 277, 26/277/342, 5, or 5/83/96/277/342, wherein the amino acid positions are relative to the reference sequence corresponding to SEQ ID NO: 750.

[0238] In some embodiments, the amino acid sequence of the engineered oxalate decarboxylase polypeptide comprises at least a substitution or substitution set 5S/26A/83W/342R, 5S/26A/277T, 5S/96L/277T, 5S/83W/277T/342R, 26A/83W/277T, 5S/26A/83W/277V, 5S/277T/342R, 5S/83W/277V/342R, 5S/26A/166R/277T, 83W/277T/342R, 83R/96L/277V/342R, 83W/96L/277T, 26A/83W/277V/342R, 5S/26A/83W/277V/342R, 5S/83R/277T/342R, 5S/26A/83W/277T/342R, 5S/83R/277V, 26A/277T, 83W/277T, 5S/35V/277T, 5S/26A/83R/96R/277V, 5S/26A/96L/277T, 5S/277T, 5S/26A/83R/277T, 5S/83R/277T, 26A/83R/277V, 5S/26A/277V, 5S/166R/277T, 26A/83W/277V, 26A/83W/96L/277V/342R, 277T, 26A/277T/342R, 83W/277V/342R, 83R/277V, 5S, 26A/277V, 83R/277T, 5S/83W/96R/277T/342R, 5S/277V, 277V, 5S/277V/342R, 83W/96L/277V, or 83W/277V, wherein the amino acid positions are relative to the reference sequence corresponding to SEQ ID NO: 750.

[0239] In some embodiments, the amino acid sequence of the engineered oxalate decarboxylase polypeptide comprises at least a substitution or substitution set T5S/E26A/T83W/T342R, T5S/E26A/Y277T, T5S/A96L/Y277T, T5S/T83W/Y277T/T342R, E26A/T83W/Y277T, T5S/E26A/T83W/Y277V, T5S/Y277T/T342R, T5S/T83W/Y277V/T342R, T5S/E26A/S166R/Y277T, T83W/Y277T/T342R, T83R/A96L/Y277V/T342R, T83W/A96L/Y277T, E26A/T83W/Y277V/T342R, T5S/E26A/T83W/Y277V/T342R, T5S/T83R/Y277T/T342R, T5S/E26A/T83W/Y277T/T342R, T5S/T83R/Y277V, E26A/Y277T, T83W/Y277T, T5S/I35V/Y277T, T5S/E26A/T83R/A96R/Y277V, T5S/E26A/A96L/Y277T, T5S/Y277T, T5S/E26A/T83R/Y277T, T5S/T83R/Y277T, E26A/T83R/Y277V, T5S/E26A/Y277V, T5S/S166R/Y277T, E26A/T83W/Y277V, E26A/T83W/A96L/Y277V/T342R, Y277T, E26A/Y277T/T342R, T83W/Y277V/T342R, T83R/Y277V, T5S, E26A/Y277V, T83R/Y277T, T5S/T83W/A96R/Y277T/T342R, T5S/Y277V, Y277V, T5S/Y277V/T342R, T83W/A96L/Y277V, or T83W/Y277V, wherein the amino acid positions are relative to the reference sequence corresponding to SEQ ID NO: 750.

[0240] In some embodiments, the engineered oxalate decarboxylase polypeptide comprises an amino acid sequence having at least 70%, 75%, 80%, 81%, 82%, 83%, 84%, 85%, 86%, 87%, 88%, 89%, 90%, 91%, 92%, 93%, 94%, 95%, 96%, 97%, 98%, 99%, or more sequence identity to a reference sequence corresponding to SEQ ID NO: 906, wherein the amino acid sequence comprises one or more amino acid substitutions relative to the reference sequence corresponding to SEQ ID NO: 906.

[0241] In some embodiments, the amino acid sequence of the engineered oxalate decarboxylase polypeptide comprises at least a substitution at amino acid position 26, 31, 96, 60, 318, 210, 277, 37, 16, 195, 79, 17, 13, 83, 162, or 174, or combinations thereof, wherein the amino acid positions are relative to the reference sequence corresponding to SEQ ID NO: 906.

[0242] In some embodiments, the amino acid sequence of the engineered oxalate decarboxylase polypeptide comprises at least a substitution 26L, 31W, 96K, 60R, 318D, 26G, 210R, 31R, 277F, 37M, 96P, 16V, 60A, 26R, 31G, 195G, 318R, 26V, 79M, 16M, 210A, 96R, 37E, 16G, 17W, 13G, 79E, 277T, 60Q, 31L, 96G, 96T, 60G, 16W, 13T, 79R, 26Y, 26S, 195R, 17R, 13V, 277E, 37L, 210G, 60L, 13L, 83Y, 37W, 277G, 83R, 60Y, 210S, 318S, 17I, 37S, 79L, 16R, 195S, 318G, 26C, 13R, 195Y, 60E, 162V, 16C, 96V, 83M, 31M, 174V, 277L, 26M, 318M, 210N, 26A, 277R, 96F, 174G, 16Q, 277A, 13Q, 79F, 16L, 195N, 79V, 17P, 60P, 37P, 96W, 162T, 195M, 318W, 37R, 16T, 210M, 162Y, 16P, 83E, 277M, 174L, 17V, 17E, 17L, 96M, 318V, 174R, 13S, 174T, 13Y, 195A, 277W, 60M, 17A, 318A, 174H, 83S, 277I, 13E, 17K, 26K, 96A, 174D, 210V, 31S, 195C, 79K, 60W, 174S, 13I, 60H, 31E, 96E, 83K, 31Q, 16K, 174M, 37V, 79D, 318T, 195F, 26T, 174Q, 83L, 96I, 13C, 13A, 96Q, 13H, 83T, 31Y, 13W, 277P, 195T, 60S, 26Q, 210P, 174N, 83A, 162E, 37F, 37Q, 31T, 174A, 83F, 60T, 96S, 83V, 210I, 16D, 37C, 83G, 13N, 31V, 79S, 96Y, 17F, 17M, 16A, 83P, 318L, 79Q, 17S, 26W, 195D, 195W, 277S, 174E, 16E, 162F, 79Y, 79A, 17C, 17Y, 195Q, 26P, 195I, 60F, 26I, 17D, 318K, 60N, 16I, 318H, 37A, 195V, 210Y, 195E, 26H, 13D, 31P, 210W, 318P, 83C, 174P, 210T, 17T, 79T, 96H, 79W, 162L, 318E, 31A, 210C, 17N, 195K, 318Y, 17H, 13M, 60D, 277K, 16N, 79C, 13K, 60K, 37N, 60I, 162D, 162I, 16Y, 162S, 96C, 210K, 174I, 210L, 26D, 26N, 210D, 13F, 318N, 277Y, 174W, 31H, 31D, 79N, 37K, 31I, 37H, 318C, 31F, 79P, 195P, 318I, 162A, 277Q, 26F, 277C, 79H, 31C, 79I, 37I, 17Q, 31N, 277N, 37D, 277H, 277D, 96D, 174C, 162P, 318F, 83N, 60C, 83I, 162M, 210H, 195H, 174Y, 37Y, 210Q, 37T, 96N, 83H, 16H, 174F, 83D, 83Q, 162H, 162W, 162N, 16F, 162Q, 162G, 162R, 210F, or 162C, or combinations thereof, wherein the amino acid positions are relative to the reference sequence corresponding to SEQ ID NO: 906.

[0243] In some embodiments, the amino acid sequence of the engineered oxalate decarboxylase polypeptide comprises at least a substitution E26L, K31W, L96K, V60R, Q318D, E26G, E210R, K31R, V277F, G37M, L96P, S16V, V60A, E26R, K31G, L195G, Q318R, E26V, G79M, S16M, E210A, L96R, G37E, S16G, G17W, P13G, G79E, V277T, V60Q, K31L, L96G, L96T, V60G, S16W, P13T, G79R, E26Y, E26S, L195R, G17R, P13V, V277E, G37L, E210G, V60L, P13L, W83Y, G37W, V277G, W83R, V60Y, E210S, Q318S, G17I, G37S, G79L, S16R, L195S, Q318G, E26C, P13R, L195Y, V60E, K162V, S16C, L96V, W83M, K31M, K174V, V277L, E26M, Q318M, E210N, E26A, V277R, L96F, K174G, S16Q, V277A, P13Q, G79F, S16L, L195N, G79V, G17P, V60P, G37P, L96W, K162T, L195M, Q318W, G37R, S16T, E210M, K162Y, S16P, W83E, V277M, K174L, G17V, G17E, G17L, L96M, Q318V, K174R, P13S, K174T, P13Y, L195A, V277W, V60M, G17A, Q318A, K174H, W83S, V277I, P13E, G17K, E26K, L96A, K174D, E210V, K31S, L195C, G79K, V60W, K174S, P13I, V60H, K31E, L96E, W83K, K31Q, S16K, K174M, G37V, G79D, Q318T, L195F, E26T, K174Q, W83L, L96I, P13C, P13A, L96Q, P13H, W83T, K31Y, P13W, V277P, L195T, V60S, E26Q, E210P, K174N, W83A, K162E, G37F, G37Q, K31T, K174A, W83F, V60T, L96S, W83V, E210I, S16D, G37C, W83G, P13N, K31V, G79S, L96Y, G17F, G17M, S16A, W83P, Q318L, G79Q, G17S, E26W, L195D, L195W, V277S, K174E, S16E, K162F, G79Y, G79A, G17C, G17Y, L195Q, E26P, L195I, V60F, E26I, G17D, Q318K, V60N, S16I, Q318H, G37A, L195V, E210Y, L195E, E26H, P13D, K31P, E210W, Q318P, W83C, K174P, E210T, G17T, G79T, L96H, G79W, K162L, Q318E, K31A, E210C, G17N, L195K, Q318Y, G17H, P13M, V60D, V277K, S16N, G79C, P13K, V60K, G37N, V60I, K162D, K162I, S16Y, K162S, L96C, E210K, K174I, E210L, E26D, E26N, E210D, P13F, Q318N, V277Y, K174W, K31H, K31D, G79N, G37K, K31I, G37H, Q318C, K31F, G79P, L195P, Q318I, K162A, V277Q, E26F, V277C, G79H, K31C, G79I, G37I, G17Q, K31N, V277N, G37D, V277H, V277D, L96D, K174C, K162P, Q318F, W83N, V60C, W83I, K162M, E210H, L195H, K174Y, G37Y, E210Q, G37T, L96N, W83H, S16H, K174F, W83D, W83Q, K162H, K162W, K162N, S16F, K162Q, K162G, K162R, E210F, or K162C, or combinations thereof, wherein the amino acid positions are relative to the reference sequence corresponding to SEQ ID NO: 906.

[0244] In some embodiments, the amino acid sequence of the engineered oxalate decarboxylase polypeptide comprises at least a substitution or substitution set at amino acid position(s) 174/318, 26/96, 60/318, 31/318, 162/174/318, 174/277/318, 26/195/318, 60/162/195, 60/162/318, 174/195/277, 16/17/174, 60/195/277, 37/277/318, 16/162/195/277, 26/79/83/162, 26/31/60/318, 16/174/195/277, 13/37/83/162, 16/17/60/195, 13/17/37/83, 31/37/162/174/318, 13/16/31/83/162, 16/60/174/195/318, 17/60/96/162/195/277, 13/26/60/83/162/174, 17/31/60/162/174/277, 16/17/26/83/96/277, 17/26/37/174/277/318, 13/16/31/60/162/174, 13/17/31/83/277/318, 13/16/17/31/83/162/318, 13/16/60/83/162/195/318, 13/16/17/31/37/83/96/162, 13/17/26/37/60/83/162/210/318, 13/16/26/31/83/96/162/174/318, 13/16/17/31/60/83/96/162/174/195/318, 13/16/26/37/60/83/162/174/195/210/318, 13/16/37/79/83/96/162/174/195/210/277, 13/17/26/31/37/60/79/83/96/162/174/210, 13/16/17/26/37/79/83/96/174/195/210/318, 13/26/31/37/60/83/96/162/174/195/210/277/318, 13/16/17/31/37/60/79/83/96/162/174/195/210/318, 13/16/17/31/60/79/83/96/162/174/195/210/277/318, 13/16/17/26/37/60/79/96/162/174/195/210/277/318, 13/26/31/37/60/79/83/96/162/174/195/210/277/318, 13/16/17/26/31/37/60/96/162/174/195/210/277/318, 13/16/17/26/31/37/79/83/96/162/174/195/210/318, 13/16/17/26/31/37/60/79/96/162/174/210/277/318, 13/17/26/31/37/60/79/83/96/162/174/195/210/277/318, 13/16/26/31/37/60/79/83/96/162/174/195/210/277/318, 16/17/26/31/37/60/79/83/96/162/174/195/210/277/318, or 13/16/17/26/31/37/60/79/83/96/162/174/195/210/277/318, wherein the amino acid positions are relative to the reference sequence corresponding to SEQ ID NO: 906.

[0245] In some embodiments, the amino acid sequence of the engineered oxalate decarboxylase polypeptide comprises at least a substitution or substitution set 174D/318E, 26A/96A, 60T/318E, 31E/318E, 162G/174D/318E, 174D/277Y/318E, 26A/195R/318E, 60T/162G/195R, 60T/162G/318E, 174D/195R/277Y, 16A/17D/174D, 60T/195R/277Y, 37K/277Y/318E, 16A/162G/195R/277Y, 26A/79A/83T/162G, 26A/31E/60T/318E, 16A/174D/195R/277Y, 13H/37K/83T/162G, 16A/17D/60T/195R, 13H/17D/37K/83T, 31E/37K/162G/174D/318E, 13H/16A/31E/83T/162G, 16A/60T/174D/195R/318E, 17D/60T/96A/162G/195R/277Y, 13H/26A/60T/83T/162G/174D, 17D/31E/60T/162G/174D/277Y, 16A/17D/26A/83T/96A/277Y, 17D/26A/37K/174D/277Y/318E, 13H/16A/31E/60T/162G/174D, 13H/17D/31E/83T/277Y/318E, 13H/16A/17D/31E/83T/162G/318E, 13H/16A/60T/83T/162G/195R/318E, 13H/16A/17D/31E/37K/83T/96A/162G, 13H/17D/26A/37K/60T/83T/162G/210P/318E, 13H/16A/26A/37K/83T/162G/174D/195R/318E, 13H/16A/26A/31E/83T/96A/162G/174D/318E, 13H/16A/17D/31E/60T/83T/96A/162G/174D/195R/318E, 13H/16A/26A/37K/60T/83T/162G/174D/195R/210P/318E, 13H/16A/37K/79A/83T/96A/162G/174D/195R/210P/277Y, 13H/17D/26A/31E/37K/60T/79A/83T/96A/162G/174D/210P, 13H/16A/17D/26A/37K/79A/83T/96A/174D/195R/210D/318E, 13H/26A/31E/37K/60T/83T/96A/162G/174D/195R/210P/277Y/318E, 13H/16A/17D/31E/37K/60T/79A/83T/96A/162G/174D/195R/210P/318E, 13H/16A/17D/31E/60T/79A/83T/96A/162G/174D/195R/210P/277Y/318E, 13H/16A/17D/26A/37K/60T/79A/96A/162G/174D/195R/210P/277Y/318E, 13H/26A/31E/37K/60T/79A/83T/96A/162G/174D/195R/210P/277Y/318E, 13H/16A/17D/26A/31E/37K/60T/96A/162G/174D/195R/210P/277Y/318E, 13H/16A/17D/26A/31E/37K/79A/83T/96A/162G/174D/195R/210P/318E, 13H/16A/17D/26A/31E/37K/60T/79A/96A/162G/174D/210P/277Y/318E, 13H/17D/26A/31E/37K/60T/79A/83T/96A/162G/174D/195R/210P/277Y/318E, 13H/16A/26A/31E/37K/60T/79A/83T/96A/162G/174D/195R/210P/277Y/318E, 16A/17D/26A/31E/37K/60T/79A/83T/96A/162G/174D/195R/210P/277Y/318E, or 13H/16A/17D/26A/31E/37K/60T/79A/83T/96A/162G/174D/195R/210P/277H/318E, wherein the amino acid positions are relative to the reference sequence corresponding to SEQ ID NO: 906.

[0246] In some embodiments, the amino acid sequence of the engineered oxalate decarboxylase polypeptide comprises at least a substitution or substitution set K174D/Q318E, E26A/L96A, V60T/Q318E, K31E/Q318E, K162G/K174D/Q318E, K174D/V277Y/Q318E, E26A/L195R/Q318E, V60T/K162G/L195R, V60T/K162G/Q318E, K174D/L195R/V277Y, S16A/G17D/K174D, V60T/L195R/V277Y, G37K/V277Y/Q318E, S16A/K162G/L195R/V277Y, E26A/G79A/W83T/K162G, E26A/K31E/V60T/Q318E, S16A/K174D/L195R/V277Y, P13H/G37K/W83T/K162G, S16A/G17D/V60T/L195R, P13H/G17D/G37K/W83T, K31E/G37K/K162G/K174D/Q318E, P13H/S16A/K31E/W83T/K162G, S16A/V60T/K174D/L195R/Q318E, G17D/V60T/L96A/K162G/L195R/V277Y, P13H/E26A/V60T/W83T/K162G/K174D, G17D/K31E/V60T/K162G/K174D/V277Y, S16A/G17D/E26A/W83T/L96A/V277Y, G17D/E26A/G37K/K174D/V277Y/Q318E, P13H/S16A/K31E/V60T/K162G/K174D, P13H/G17D/K31E/W83T/V277Y/Q318E, P13H/S16A/G17D/K31E/W83T/K162G/Q318E, P13H/S16A/V60T/W83T/K162G/L195R/Q318E, P13H/S16A/G17D/K31E/G37K/W83T/L96A/K162G, P13H/G17D/E26A/G37K/V60T/W83T/K162G/E210P/Q318E, P13H/S16A/E26A/G37K/W83T/K162G/K174D/L195R/Q318E, P13H/S16A/E26A/K31E/W83T/L96A/K162G/K174D/Q318E, P13H/S16A/G17D/K31E/V60T/W83T/L96A/K162G/K174D/L195R/Q318E, P13H/S16A/E26A/G37K/V60T/W83T/K162G/K174D/L195R/E210P/Q318E, P13H/S16A/G37K/G79A/W83T/L96A/K162G/K174D/L195R/E210P/V277Y, P13H/G17D/E26A/K31E/G37K/V60T/G79A/W83T/L96A/K162G/K174D/E210P, P13H/S16A/G17D/E26A/G37K/G79A/W83T/L96A/K174D/L195R/E210D/Q318E, P13H/E26A/K31E/G37K/V60T/W83T/L96A/K162G/K174D/L195R/E210P/V277Y/Q318E, P13H/S16A/G17D/K31E/G37K/V60T/G7T9A/W83T/L96A/K162G/K174D/L195R/E210P/Q318E, P13H/S16A/G17D/K31E/V60T/G79A/W83T/L96A/K162G/K174D/L195R/E210P/V277Y/Q318E, P13H/S16A/G17D/E26A/G37K/V60T/G79A/L96A/K162G/K174D/L195R/E210P/V277Y/Q318E, P13H/E26A/K31E/G37K/V60T/G79A/W83T/L96A/K162G/K174D/L195R/E210P/V277Y/Q318E, P13H/S16A/G17D/E26A/K31E/G37K/V60T/L96A/K162G/K174D/L195R/E210P/V277Y/Q318E, P13H/S16A/G17D/E26A/K31E/G37K/G79A/W83T/L96A/K162G/K174D/L195R/E210P/Q318E, P13H/S16A/G17D/E26A/K31E/G37K/V60T/G79A/L96A/K162G/K174D/E210P/V277Y/Q318E, P13H/G17D/E26A/K31E/G37K/V60T/G79A/W83T/L96A/K162G/K174D/L195R/E210P/V277Y/Q3 18E, P13H/S16A/E26A/K31E/G37K/V60T/G79A/W83T/L96A/K162G/K174D/L195R/E210P/V277Y/Q3 18E, S16A/G17D/E26A/K31E/G37K/V60T/G79A/W83T/L96A/K162G/K174D/L195R/E210P/V277Y/Q3 18E, or P13H/S16A/G17D/E26A/K31E/G37K/V60T/G79AW83T/L96A/K162G/K174D/L195R/E210P/V27 7H/Q318E, wherein the amino acid positions are relative to the reference sequence corresponding to SEQ ID NO: 906.

[0247] In some embodiments, the amino acid sequence of the engineered oxalate decarboxylase polypeptide comprises at least a substitution at an amino acid position set forth in Tables 4-1, 4-2, 4-3, 4-4, 4-5, 4-6, 4-7, 5-1, and 5-2, wherein the amino acid positions are relative to the reference sequence corresponding to SEQ ID NO: 172, 320, 396, 616, 670, 750, or 906, or relative to the reference sequence corresponding to residues 1-359 of SEQ ID NO: 172, 320, or 396.

[0248] In some embodiments, the amino acid sequence of the engineered oxalate decarboxylase polypeptide comprises at least a substitution set forth in any of Tables 4-1, 4-2, 4-3, 4-4, 4-5, 4-6, 4-7, 5-1, and 5-2, wherein the amino acid positions are relative to the reference sequence corresponding to SEQ ID NO: 172, 320, 396, 616, 670, 750, or 906, or relative to the reference sequence corresponding to residues 1-359 of SEQ ID NO: 172, 320, or 396.

[0249] In some embodiments, the amino acid sequence of the engineered oxalate decarboxylase polypeptide comprises at least a substitution or substitution set at amino acid position(s) set forth in Tables 4-1, 4-2, 4-3, 4-4, 4-5, 4-6, 4-7, 5-1, and 5-2, wherein the amino acid positions are relative to the reference sequence corresponding to SEQ ID NO: 172, 320, 396, 616, 670, 750, or 906, or relative to the reference sequence corresponding to residues 1-359 of SEQ ID NO: 172, 320, or 396.

[0250] In some embodiments, the amino acid sequence of the engineered oxalate decarboxylase polypeptide comprises at least a substitution or substitution set of an oxalate decarboxylase polypeptide set forth in Tables 4-1, 4-2, 4-3, 4-4, 4-5, 4-6, 4-7, 5-1, and 5-2, wherein the amino acid positions are relative to the reference sequence corresponding to SEQ ID NO: 172, 320, 396, 616, 670, 750, or 906, or relative to the reference sequence corresponding to residues 1-359 of SEQ ID NO: 172, 320, or 396.

[0251] In some embodiments, the engineered oxalate decarboxylase polypeptide comprises the amino acid sequence of an engineered oxalate decarboxylase polypeptide set forth in Tables 4-1, 4-2, 4-3, 4-4, 4-5, 4-6, 4-7, 5-1, and 5-2.

[0252] In some embodiments, the engineered oxalate decarboxylase polypeptide comprises an amino acid sequence comprising SEQ ID NO: 4; an amino acid sequence comprising residues 1-359 of an even-numbered SEQ ID NO. of SEQ ID NOs: 28-614; an amino acid sequence comprising an even-numbered SEQ ID NO. of SEQ ID NOs: 28-614; or an amino acid sequence comprising an even-numbered SEQ ID NO. of SEQ ID NOs: 616-1622, optionally wherein the amino acid sequence includes 1, 2, 3, 4, 5, 6, 7, 8, 9, or up to 10 amino acid substitutions, insertions and/or deletions. In some embodiments, optionally the amino acid sequence of the engineered oxalate decarboxylase polypeptide includes 1, 2, 3, 4, or 5 amino acid substitutions, insertions, and/or deletions.

[0253] In some embodiments, the engineered oxalate decarboxylase polypeptide comprises an amino acid sequence corresponding to residues 1-359 of SEQ ID NO: 172, 320, or 396, or corresponding to SEQ ID NO: 172, 320, 396, 616, 670, 750, or 906, optionally wherein the amino acid sequence includes 1, 2, 3, 4, 5, 6, 7, 8, 9, or up to 10 amino acid substitutions, insertions and/or deletions. In some embodiments, optionally the amino acid sequence of the engineered oxalate decarboxylase polypeptide includes 1, 2, 3, 4, or 5 amino acid substitutions, insertions, and/or deletions.

[0254] In some embodiments of the foregoing, optionally the amino acid sequence includes 1, 2, 3, 4, 5, 6, 7, 8, 9, or up to 10 amino acid substitutions, or 1, 2, 3, 4, or 5 amino acid substitutions. In some embodiments, the substitutions comprise non-conservative substitutions. In some embodiments, the substitutions comprise conservative substitutions.

[0255] In some embodiments, the amino acid sequence of the engineered oxalate decarboxylase polypeptide comprises an even-numbered SEQ ID NO. of SEQ ID NOs: 28-174. In some embodiments, the amino acid sequence of the engineered oxalate decarboxylase polypeptide comprises an even-numbered SEQ ID NO. of SEQ ID NOs: 176-394. In some embodiments, the amino acid sequence of the engineered oxalate decarboxylase polypeptide comprises an even-numbered SEQ ID NO. of SEQ ID NOs: 396-530. In some embodiments, the amino acid sequence of the engineered oxalate decarboxylase polypeptide comprises an even-numbered SEQ ID NO. of SEQ ID NOs: 532-614. In some embodiments, the amino acid sequence of the engineered oxalate decarboxylase polypeptide comprises an even-numbered SEQ ID NO. of SEQ ID NOs: 616-728. In some embodiments, the amino acid sequence of the engineered oxalate decarboxylase polypeptide comprises an even-numbered SEQ ID NO. of SEQ ID NOs: 730-822. In some embodiments, the amino acid sequence of the engineered oxalate decarboxylase polypeptide comprises an even-numbered SEQ ID NO. of SEQ ID NOs: 824-908. In some embodiments, the amino acid sequence of the engineered oxalate decarboxylase polypeptide comprises an even-numbered SEQ ID NO. of SEQ ID NOs: 910-1516. In some embodiments, the amino acid sequence of the engineered oxalate decarboxylase polypeptide comprises an even-numbered SEQ ID NO. of SEQ ID NOs: 1518-1622.

[0256] In some embodiments, the engineered oxalate decarboxylase has oxalate decarboxylase activity. In some embodiments, the engineered oxalate decarboxylase has oxalate decarboxylase activity and exhibits one or more improved enzyme properties compared to a reference oxalate decarboxylase having a sequence corresponding to SEQ ID NO: 2, 4, 172, 320, 396, 616, 670, 750, or 906, or a reference sequence corresponding to residues 1-359 of SEQ ID NO: 172, 320, or 396.

[0257] In some embodiments, the engineered oxalate decarboxylase polypeptide has increased enzyme activity compared to the reference oxalate decarboxylase. In some embodiments, the engineered oxalate decarboxylase polypeptide has increased activity at about pH 6 or less, about pH 5.5 or less, about pH 4.5 or less, about pH 3 or less, about pH 2.6 or less, or about pH 2.4 or less, to about pH 2 compared to the reference oxalate decarboxylase.

[0258] In some embodiments, the engineered oxalate decarboxylase polypeptide has increased stability at about pH 6 or less, about pH 5.5 or less, about pH 4.5 or less, about pH 3 or less, about pH 2.6 or less, or about pH 2.4 or less, to about pH 2 compared to the reference oxalate decarboxylase polypeptide.

[0259] In some embodiments, the engineered oxalate decarboxylase polypeptide has increased thermostability compared to the reference oxalate decarboxylase.

[0260] In some embodiments, the engineered oxalate decarboxylase polypeptide has increased resistance to proteolysis at pH of about 2.2 to 3.2 relative to the reference oxalate decarboxylase polypeptide. In some embodiments, the engineered oxalate decarboxylase polypeptide described herein exhibits increased resistance to proteolysis at pH of about 2.2.

[0261] In some embodiments, the engineered oxalate decarboxylase polypeptide described herein exhibits increased resistance to proteolysis by digestive enzymes, such as pepsin or chymotrypsin, particularly pepsin, including at the pHs described in the foregoing, compared to the reference oxalate decarboxylase.

[0262] In some embodiments, the improved enzyme property of the engineered oxalate decarboxylase polypeptide is selected from (a) increased activity on oxalate, (b) increased thermal stability, (c) increased stability at acidic pH, (d) increased activity at acidic pH, (e) increased activity at neutral pH, (f) increased expression, (g) increased solubility, and (h) increased resistance to proteolysis, or any combination of (a), (b), (c), (d), (e), (f), (g) and (h), compared to a reference oxalate decarboxylase having a sequence corresponding to SEQ ID NO: 2, 4, 172, 320, 396, 616, 670, 750, or 906.

[0263] In some embodiments, the improved property of the engineered oxalate decarboxylase polypeptide is relative to the reference oxalate decarboxylase polypeptide corresponding to SEQ ID NO: 2 or 4.

[0264] In some embodiments, the engineered oxalate decarboxylase polypeptide comprises an amino acid sequence having at least 70%, 75%, 80%, 81%, 82%, 83%, 84%, 85%, 86%, 87%, 88%, 89%, 90%, 91%, 92%, 93%, 94%, 95%, 96%, 97%, 98%, 99%, or more sequence identity to a reference amino acid sequence corresponding to SEQ ID NO: 4, 6, 8, 10, 12, 14, 16, 18, 20, 22, 24, or 26, or to a reference amino acid sequence corresponding to residues 1-424 of SEQ ID NO: 6.

[0265] In some embodiments, the engineered oxalate decarboxylase polypeptide comprises an amino acid sequence having at least 70%, 75%, 80%, 81%, 82%, 83%, 84%, 85%, 86%, 87%, 88%, 89%, 90%, 91%, 92%, 93%, 94%, 95%, 96%, 97%, 98%, 99%, or more sequence identity to a reference amino acid sequence corresponding to SEQ ID NO: 4, 6, 8, 10, 12, 14, 16, 18, 20, 22, 24, or 26, or to a reference amino acid sequence corresponding to residues 1-424 of SEQ ID NO: 6, wherein the amino acid sequence comprises one or more substitutions in its amino acid sequence.

[0266] In some embodiments, the engineered oxalate decarboxylase polypeptide comprises an amino acid sequence comprising SEQ ID NO: 2, 4, 6, 8, 10, 12, 14, 16, 18, 20, 22, 24, or 26, or an amino acid comprising residues 1-424 of SEQ ID NO: 6. In some embodiments, the foregoing engineered oxalate decarboxylase are provided as compositions, particularly pharmaceutical compositions, as further described herein.

[0267] In some embodiments, the present disclosure provides fusion proteins comprising the engineered oxalate decarboxylase polypeptides described herein. In some embodiments, the engineered oxalate decarboxylase polypeptide can be fused to a variety of amino acid sequences, such as polypeptide tags that can be used for detection and/or purification. In some embodiments, the fusion protein of the engineered oxalate decarboxylase polypeptides comprises a glycine-histidine or histidine-tag (His-tag), such as the exemplary engineered oxalate decarboxylase polypeptides with the His-tag sequences disclosed herein. In some embodiments, the fusion protein of the engineered oxalate decarboxylase polypeptides comprises an epitope tag, such as c-myc or hemagglutinin (HA). In some embodiments, the fusion is to the amino (N-) terminus of an engineered oxalate decarboxylase polypeptide. In some embodiments, the fusion is to the carboxy (C-) terminus of an engineered oxalate decarboxylase polypeptide. In some embodiments, when an engineered oxalate decarboxylase polypeptide amino acid sequence herein is presented as a fusion protein, it is also to be understood that the present disclosure also encompasses the engineered oxalate decarboxylase polypeptide without the fusion polypeptide.

[0268] It is also known in the art that protein synthesis is initiated with N-terminal methionine in eukaryotes or formylmethionine in prokaryotes and mitochondria. In eukaryotes, the initiating methionine is removed by cleavage of an N-terminal signal peptide present in secreted proteins or by the action of a methionine amino peptidase (MAP). In prokaryotes, the formylmethionine can be removed by formylmethionine deformylase and the resulting methionine removed by a methionine amino peptidase. Accordingly, it is to be understood that for each and every embodiment of an engineered oxalate decarboxylase polypeptide described herein that contains an N-terminal initiating methionine or formylmethionine, the present disclosure also provides engineered oxalate decarboxylase polypeptide lacking the initiating methionine or formylmethionine. By way of example and not limitation, when the present disclosure provides an engineered oxalate decarboxylase polypeptide as an amino acid sequence comprising residues 1-359 in reference to a specified sequence, where amino acid position 1 is an initiating methionine or formylmethionine, in some embodiments, the present disclosure also provides an engineered oxalate decarboxylase polypeptide comprising residues 2 to 359 in reference to the specified sequence, which lacks the initiating methionine or formylmethionine. Similarly, when the present disclosure provides an engineered oxalate decarboxylase polypeptide comprising a sequence corresponding to a specific SEQ ID NO., in some embodiments, the present disclosure also provides an engineered oxalate decarboxylase polypeptide comprising an amino acid sequence corresponding to the specific SEQ ID NO. lacking the N-terminal initiating methionine or formylmethionine at amino acid position 1.

[0269] In some embodiments, the present disclosure provides functional or biologically active fragments of the engineered oxalate decarboxylase polypeptides described herein. In some embodiments, functional or biologically active fragments comprise at least about 90%, at least about 95%, at least about 96%, at least about 97%, at least about 98%, or at least about 99% of the activity of the engineered oxalate decarboxylase polypeptide from which it was derived (i.e., the parent engineered oxalate decarboxylase). In some embodiments, functional or biologically active fragments comprise at least about 90%, at least about 91%, at least about 92%, at least about 93%, at least about 94%, at least about 95%, at least about 96%, at least about 97%, at least about 98%, or at least about 99% of the parent sequence of the engineered oxalate decarboxylase polypeptide. In some embodiments the functional or biologically active fragment is truncated by less than 5, less than 10, less than 15, less than 10, less than 25, less than 30, less than 35, less than 40, less than 45, or less than 50 amino acids.

[0270] In some embodiments, the functional or biologically fragments comprise at least about 95%, 96%, 97%, 98%, or 99% of the activity of the engineered oxalate decarboxylase polypeptide from which it was derived (i.e., the parent engineered oxalate decarboxylase).

[0271] In some embodiments, the functional or biologically active fragment of the engineered oxalate decarboxylase polypeptide described herein includes at least a mutation or mutation set in the amino acid sequence of the engineered oxalate decarboxylase polypeptide described herein. Accordingly, in some embodiments, the functional or biologically active fragments of the engineered oxalate decarboxylase polypeptide displays the enhanced or improved property associated with the mutation or mutation set in the parent engineered oxalate decarboxylase polypeptide. In some embodiments, the functional or biologically active fragments are characterized by an improved property relative to the reference engineered oxalate polypeptide having a sequence corresponding to SEQ ID NO: 2, 4, 172, 320, 396, 616, 670, 750, or 906. In some embodiments, the functional or biologically active fragments exhibits one or more improved enzyme property of increased activity on oxalate, increased thermal stability, increased stability at acidic pH, increased activity at acidic pH, and increased resistance to proteolysis, relative to the reference oxalate decarboxylase polypeptide having a sequence corresponding to SEQ ID NO: 2, 4, 172, 320, 396, 616, 670, 750, or 906. In some embodiments, the improved property of the functional or biologically active fragment is relative to the reference engineered oxalate carboxylase of SEQ ID NO: 2 or 4.

### Polynucleotides Encoding Engineered Polypeptides. Expression Vectors and Host Cells

[0272] In another aspect, the present disclosure provides recombinant polynucleotides encoding the engineered oxalate decarboxylase polypeptides described herein. In some embodiments, the recombinant polynucleotide is operatively linked to one or more heterologous regulatory sequences that control gene expression to create a polynucleotide, e.g., an expression vector, capable of expressing the polypeptide. In some embodiments, expression constructs containing at least one heterologous polynucleotide encoding the engineered oxalate decarboxylase polypeptide(s) is introduced into appropriate host cells to express the encoded engineered oxalate decarboxylase polypeptide(s).

[0273] As will be apparent to the skilled artisan, availability of a protein sequence and the knowledge of the codons corresponding to the various amino acids provide a description of all the polynucleotides capable of encoding the subject polypeptides. The degeneracy of the genetic code, where the same amino acids are encoded by alternative or synonymous codons, allows an extremely large number of nucleic acids to be made, all of which encode an engineered oxalate decarboxylase polypeptide. Thus, the present invention provides methods and compositions for the production of each and every possible variation of recombinant polynucleotides that encode the engineered oxalate decarboxylase polypeptides described herein by selecting combinations based on the possible codon choices, and all such variations are to be considered specifically disclosed for any polypeptide described herein, including the amino acid sequences presented in the Examples (e.g., in Tables 4-1, 4-2, 4-3, 4-4, 4-5, 4-6, 4-7, 5-1, and/or 5-2).

[0274] In some embodiments, the codons are preferably optimized for utilization by the chosen host cell for protein production. For example, preferred codons used in bacteria are typically used for expression in bacteria, preferred codons used in fungi are typically used for expression in fungi, and preferred codons used in mammals are used for expression in mammals and mammalian cells. In some embodiments, codon optimized polynucleotides encoding the engineered oxalate decarboxylase polypeptides contain preferred codons at about 40%, 50%, 60%, 70%, 80%, 90%, or greater than 90% of the codon positions in the full-length coding region.

[0275] As discussed above, it is to be understood that the present disclosure provides recombinant polynucleotides encoding each and every one of the oxalate decarboxylase polypeptides described above.

[0276] Accordingly, by way of example and not limitation, in some embodiments, the recombinant polynucleotide comprises a polynucleotide sequence encoding an engineered oxalate decarboxylase polypeptide comprising an amino acid sequence having at least 70%, 75%, 80%, 81%, 82%, 83%, 84%, 85%, 86%, 87%, 88%, 89%, 90%, 91%, 92%, 93%, 94%, 95%, 96%, 97%, 98%, 99%, or more sequence identity to a reference sequence corresponding to SEQ ID NO: 2, 4, 172, 320, 396, 616, 670, 750, or 906, or to a reference sequence corresponding to residues 1-359 of SEQ ID NO: 172, 320, or 396, wherein the amino acid sequence comprises one or more amino acid substitutions relative to the reference sequence corresponding to SEQ ID NO: 2, 4, 172, 320, 396, 616, 670, 750, or 906, or relative to the reference sequence corresponding to residues 1-359 of SEQ ID NO: 172, 320, or 396.

[0277] In some embodiments, the recombinant polynucleotide comprises a polynucleotide sequence encoding an engineered oxalate decarboxylase polypeptide comprising an amino acid sequence having at least 70%, 75%, 80%, 81%, 82%, 83%, 84%, 85%, 86%, 87%, 88%, 89%, 90%, 91%, 92%, 93%, 94%, 95%, 96%, 97%, 98%, 99%, or more sequence identity to the reference sequence corresponding to SEQ ID NO: 2 or 4, wherein the amino acid sequence comprises one or more amino acid substitutions relative to the reference sequence corresponding to SEQ ID NO: 2 or 4.

[0278] In some embodiments, the recombinant polynucleotide comprises a polynucleotide sequence encoding an engineered oxalate decarboxylase polypeptide comprising an amino acid sequence having at least 70%, 75%, 80%, 81%, 82%, 83%, 84%, 85%, 86%, 87%, 88%, 89%, 90%, 91%, 92%, 93%, 94%, 95%, 96%, 97%, 98%, 99%, or more sequence identity to the reference sequence corresponding to SEQ ID NO: 172, 320, 396, 616, 670, 750, or 906, or to the reference sequence corresponding to residues 1-359 of SEQ ID NO: 172, 320, or 396, wherein the amino acid sequence comprises one or more amino acid substitutions relative to the reference sequence of SEQ ID NO: 2 or 4.

[0279] In some embodiments, the recombinant polynucleotide comprises a polynucleotide sequence encoding an engineered oxalate decarboxylase polypeptide comprising an amino acid sequence having at least 70%, 75%, 80%, 81%, 82%, 83%, 84%, 85%, 86%, 87%, 88%, 89%, 90%, 91%, 92%, 93%, 94%, 95%, 96%, 97%, 98%, 99%, or more sequence identity to the reference sequence corresponding to an even-numbered SEQ ID NO. of SEQ ID NOs: 28-1622, or to a reference sequence corresponding to residues 1-359 of an even-numbered SEQ ID NO. of SEQ ID NOs: 28-614, wherein the amino acid sequence comprises one or more amino acid substitutions relative to the reference sequence of SEQ ID NO: 2 or 4.

[0280] In some embodiments, the recombinant polynucleotide comprises a polynucleotide sequence encoding an engineered oxalate decarboxylase polypeptide comprising an amino acid sequence comprising at least a substitution at amino acid position 4, 5, 6, 7, 10, 11, 13, 14, 16, 17, 18, 19, 22, 26, 31, 33, 35, 37, 40, 43, 44, 46, 52, 54, 60, 61, 62, 63, 76, 79, 80, 82, 83, 85, 94, 96, 97, 103, 104, 106, 110, 117, 121, 123, 124, 125, 126, 128, 141, 149, 153, 155, 156, 160, 162, 164, 166, 169, 173, 174, 176, 180, 182, 183, 186, 187, 188, 189, 190, 193, 195, 196, 197, 199, 200, 205, 206, 208, 210, 212, 216, 219, 226, 227, 232, 233, 234, 240, 242, 243, 263, 265, 266, 267, 269, 270, 273, 274, 277, 284, 297, 301, 303, 304, 314, 316, 318, 331, 335, 339, 342, 343, 346, 347, 350, 351, 356, or 359, or combinations thereof, wherein the amino acid positions are relative to the reference sequence corresponding to SEQ ID NO: 2 or 4.

[0281] In some embodiments, the recombinant polynucleotide comprises a polynucleotide sequence encoding an engineered oxalate decarboxylase polypeptide comprising an amino acid sequence comprising at least a substitution at amino acid position 13, 14, 16, 17, 26, 31, 37, 60, 79, 83, 96, 162, 174, 195, 196, 210, 226, 277, 301, or 318, or combinations thereof, wherein the amino acid positions are relative to the reference sequence corresponding to SEQ ID NO: 2 or 4.

[0282] In some embodiments, the recombinant polynucleotide comprises a polynucleotide sequence encoding an engineered oxalate decarboxylase polypeptide comprising an amino acid sequence comprising as least a substitution or substitution set at amino acid position(s) 31, 210, 318, or 31/210/318, wherein the amino acid positions are relative to the reference sequence corresponding to SEQ ID NO: 2 or 4.

[0283] In some embodiments, the recombinant polynucleotide comprises a polynucleotide sequence encoding an engineered oxalate decarboxylase polypeptide comprising an amino acid sequence comprising as least a substitution or substitution set at amino acid position(s) 16, 26, 174, 195, 196, 210, 226, or 16/26/174/195/196/210/226, wherein the amino acid positions are relative to the reference sequence corresponding to SEQ ID NO: 2 or 4.

[0284] In some embodiments, the recombinant polynucleotide comprises a polynucleotide sequence encoding an engineered oxalate decarboxylase polypeptide comprising an amino acid sequence comprising at least a substitution or substitution set at amino acid position(s) 13, 17, 196, or 13/17/196, wherein the amino acid positions are relative to the reference sequence corresponding to SEQ ID NO: 2 or 4.

[0285] In some embodiments, the recombinant polynucleotide comprises a polynucleotide sequence encoding an engineered oxalate decarboxylase polypeptide comprising an amino acid sequence comprising at least a substitution or substitution set at amino acid position(s) 17, 60, 301, or 17/60/301, wherein the amino acid positions are relative to the reference sequence corresponding to SEQ ID NO: 2 or 4.

[0286] In some embodiments, the recombinant polynucleotide comprises a polynucleotide sequence encoding an engineered oxalate decarboxylase polypeptide comprising an amino acid sequence comprising at least a substitution at position 37, wherein the amino acid position is relative to the reference sequence corresponding to SEQ ID NO: 2 or 4.

[0287] In some embodiments, the recombinant polynucleotide comprises a polynucleotide sequence encoding an engineered oxalate decarboxylase polypeptide comprising an amino acid sequence comprising at least a substitution or substitution set at amino acid position(s) 14, 60, 162, 226, or 14/60/162/226, wherein the amino acid positions are relative to the reference sequence corresponding to SEQ ID NO: 2 or 4.

[0288] In some embodiments, the recombinant polynucleotide comprises a polynucleotide sequence encoding an engineered oxalate decarboxylase polypeptide comprising an amino acid sequence comprising at least a substitution or substitution set at amino acid position(s) 83, 96, 277, or 83/96/277, wherein the amino acid positions are relative to the reference sequence corresponding to SEQ ID NO: 2 or 4.

[0289] In some embodiments, the recombinant polynucleotide comprises a polynucleotide sequence encoding an engineered oxalate decarboxylase polypeptide comprising an amino acid sequence comprising at least a substitution or substitution set at amino acid position(s) 346, 124, 359, 174, 173, 123, 196, 304, 301, 347, 11, 284, 210, 169, 216, 195, 339, 4, 6, 180, 80, 243, 182, 7, 226, 156, 183, 227, 219, 62, 343, 16/26, 16/26/242, 16/26/183/232, 155/206/242, 16/26/339, 16/26/155/206/339, 26, 26/206/339, 31/82/210, 31/82, 31/356, 31/97/226, 31/240/270, 31/82/226, 31/240, 31, 31/210/318, or 31/210, wherein the amino acid positions are relative to the reference sequence corresponding to SEQ ID NO: 2 or 4.

[0290] In some embodiments, the recombinant polynucleotide comprises a polynucleotide sequence encoding an engineered oxalate decarboxylase polypeptide comprising an amino acid sequence comprising at least a substitution at an amino acid position set forth in Tables 4-1, 4-2, 4-3, 4-4, 4-5, 4-6, 4-7, 5-1, and 5-2, wherein the amino acid positions are relative to SEQ ID NO: 2 or 4.

[0291] In some embodiments, the recombinant polynucleotide comprises a polynucleotide sequence encoding an engineered oxalate decarboxylase polypeptide comprising an amino acid sequence comprising at least a substitution set forth in Tables 4-1, 4-2, 4-3, 4-4, 4-5, 4-6, 4-7, 5-1, and 5-2, wherein the amino acid positions are relative to the reference sequence corresponding to SEQ ID NO: 2 or 4.

[0292] In some embodiments, the recombinant polynucleotide comprises a polynucleotide sequence encoding an engineered oxalate decarboxylase polypeptide comprising an amino acid sequence comprising at least a substitution or substitution set at amino acid position(s) set forth in Tables 4-1, 4-2, 4-3, 4-4, 4-5, 4-6, 4-7, 5-1, and 5-2, wherein the amino acid positions are relative to the reference sequence corresponding to SEQ ID NO: 2 or 4.

[0293] In some embodiments, the recombinant polynucleotide comprises a polynucleotide sequence encoding an engineered oxalate decarboxylase polypeptide comprising an amino acid sequence comprising at least a substitution or substitution set of an engineered oxalate decarboxylase polypeptide set forth in Tables 4-1, 4-2, 4-3, 4-4, 4-5, 4-6, 4-7, 5-1, and 5-2, wherein the amino acid positions are relative to SEQ ID NO: 2 or 4.

[0294] In some embodiments, the recombinant polynucleotide comprises a polynucleotide sequence encoding an engineered oxalate decarboxylase polypeptide comprising an amino acid sequence having at least 70%, 75%, 80%, 81%, 82%, 83%, 84%, 85%, 86%, 87%, 88%, 89%, 90%, 91%, 92%, 93%, 94%, 95%, 96%, 97%, 98%, 99%, or more sequence identity to a reference sequence corresponding to SEQ ID NO: 172, 320, 396, 616, 670, 750, or 906, or to a reference sequence corresponding to residues 1-359 of SEQ ID NO: 172, 320, or 396.

[0295] In some embodiments, the recombinant polynucleotide comprises a polynucleotide sequence encoding an engineered oxalate decarboxylase polypeptide comprising an amino acid sequence having at least 70%, 75%, 80%, 81%, 82%, 83%, 84%, 85%, 86%, 87%, 88%, 89%, 90%, 91%, 92%, 93%, 94%, 95%, 96%, 97%, 98%, 99%, or more sequence identity to the reference sequence corresponding to residues 1-359 of an even-numbered SEQ ID NO. of SEQ ID NOs: 28-614, a reference sequence corresponding to an even-numbered SEQ ID NO. of SEQ ID NOs: 28-614, or a reference sequence corresponding to an even-numbered SEQ ID NO. of SEQ ID NOs: 616-1622.

[0296] In some embodiments, the recombinant polynucleotide comprises a polynucleotide sequence encoding an engineered oxalate decarboxylase polypeptide comprising an amino acid sequence having at least 70%, 75%, 80%, 81%, 82%, 83%, 84%, 85%, 86%, 87%, 88%, 89%, 90%, 91%, 92%, 93%, 94%, 95%, 96%, 97%, 98%, 99%, or more sequence identity to the reference sequence corresponding to an even-numbered SEQ ID NO. of SEQ ID NOs: 28-1622, or to the reference sequence corresponding to residues 1-359 of an even-numbered SEQ ID NO. of SEQ ID NOs: 28-614, wherein the amino acid sequence comprises one or more substitutions relative to the reference sequence corresponding to SEQ ID NO: 172, 320, 396, 616, 670, 750, or 906, or relative to the reference sequence corresponding to residues 1-359 of SEQ ID NO: 172, 320, or 396.

[0297] In some embodiments, the recombinant polynucleotide comprises a polynucleotide sequence encoding an engineered oxalate decarboxylase polypeptide comprising an amino acid sequence having at least 70%, 75%, 80%, 81%, 82%, 83%, 84%, 85%, 86%, 87%, 88%, 89%, 90%, 91%, 92%, 93%, 94%, 95%, 96%, 97%, 98%, 99%, or more sequence identity to a reference sequence corresponding to SEQ ID NO: 172, 320, 396, 616, 670, 750, or 906, or to a reference sequence corresponding to residues 1-359 of SEQ ID NO: 172, 320, or 396, wherein the amino acid sequence comprises one or more substitutions relative to the reference sequence corresponding to SEQ ID NO: 172, 320, 396, 616, 670, 750, or 906, or relative to the reference sequence corresponding to residues 1-359 of SEQ ID NO: 172, 320, or 396.

[0298] In some embodiments, the recombinant polynucleotide comprises a polynucleotide sequence encoding an engineered oxalate decarboxylase polypeptide comprising an amino acid sequence comprising at least a substitution at amino acid position 4, 5, 6, 7, 10, 11, 13, 14, 16, 17, 18, 19, 22, 26, 31, 33, 35, 37, 40, 43, 44, 46, 52, 54, 60, 61, 62, 63, 76, 79, 80, 82, 83, 85, 94, 96, 97, 103, 104, 106, 110, 117, 121, 123, 124, 125, 126, 128, 141, 149, 153, 155, 156, 160, 162, 164, 166, 169, 173, 174, 176, 180, 182, 183, 186, 187, 188, 189, 190, 193, 195, 196, 197, 199, 200, 205, 206, 208, 210, 212, 216, 219, 226, 227, 232, 233, 234, 240, 242, 243, 263, 265, 266, 267, 269, 270, 273, 274, 277, 284, 297, 301, 303, 304, 314, 316, 318, 331, 335, 339, 342, 343, 346, 347, 350, 351, 356, or 359, or combinations thereof, wherein the amino acid positions are relative to the reference sequence corresponding to residues SEQ ID NO: 172, 320, 396, 616, 670, 750, or 906, or relative to the reference sequence corresponding to residues 1-359 of SEQ ID NO: 172, 320, or 396.

[0299] In some embodiments, the recombinant polynucleotide comprises a polynucleotide sequence encoding an engineered oxalate decarboxylase polypeptide comprising an amino acid sequence comprising at least a substitution or amino acid residue 4C/R/S, 5C/S, 6A/S/W, 7G, 10A/Q/R, 11R, 13A/C/D/E/F/G/H/I/K/L/M/N/P/Q/R/S/T/V/W/Y, 14L/V, 16A/C/D/E/F/G/H/I/K/L/M/N/P/Q/R/S/T/V/W/Y, 17A/C/D/E/F/G/H/I/K/L/M/N/P/Q/R/S/T/V/W/Y, 18G/Q/R, 19C, 22R, 26A/C/D/E/F/G/H/I/K/L/M/N/P/Q/R/S/T/V/W/Y, 31A/C/D/E/F/G/H/I/K/L/M/N/P/Q/R/S/T/V/W/Y, 33R, 35V, 37A/C/D/E/F/G/H/I/K/L/M/N/P/Q/R/S/T/V/W/Y, 40S, 43C, 44S, 46R, 52T, 54L, 60A/C/D/E/F/G/H/I/K/L/M/N/P/Q/R/S/T/V/W/Y, 61M, 62G, 63A/S, 76S, 79A/C/D/E/F/G/H/I/K/L/M/N/P/Q/R/S/T/V/W/Y, 80L, 82I, 83A/C/D/E/F/G/H/I/K/L/M/N/P/Q/R/S/T/V/W/Y, 85E/G/R, 94N/T, 96A/C/D/E/F/G/H/I/K/L/M/N/P/Q/R/S/T/V/W/Y, 97T, 103Q/S/V, 104Q, 106C, 110V, 117A, 121W, 123G/Q/S, 124A/C/G/Q/R/T, 125E/F/S, 126T, 128A, 141Q, 149T, 153H/Q/S, 155L/P/R/V, 156E, 160T, 162A/C/D/E/F/G/H/I/K/L/M/N/P/Q/R/S/T/V/W/Y, 164R/V, 166R, 169A/G/L, 173Q/V, 174A/C/D/E/F/G/H/I/K/L/M/N/P/Q/R/S/T/V/W/Y, 176L, 180E, 182R, 183C/E/I/K, 186N, 187L/R/S, 188A, 189R, 190G/Q, 193A/G, 195A/C/D/E/F/G/H/I/K/L/M/N/P/Q/R/S/T/V/W/Y, 196F/K/M/R/S/V, 197E, 199G/V, 200N, 205A, 206M, 208G, 210A/C/D/E/F/G/H/I/K/L/M/N/P/Q/R/S/T/V/W/Y, 212A/F/G/L/S/V, 216S/W, 219V, 226S/T, 227E/S, 232T, 233D/H/R, 234L, 240E, 242D, 243V, 263S, 265C, 266V, 267R, 269S, 270L, 273A, 274Q/S, 277A/C/D/E/F/G/H/I/K/L/M/N/P/Q/R/S/T/V/W/Y, 284A/R/S, 297Y, 301I/Q/T, 303T, 304D/G, 314S, 316K/V, 318A/C/D/E/F/G/H/I/K/L/M/N/P/Q/R/S/T/V/W/Y, 331I/L/P/V, 335R, 339G, 342A/E/P/R, 343R/W, 346G/L/Q/W, 347F/R, 350R, 351A/E/H, 356S, or 359L/W, or combinations thereof, wherein the amino acid positions are relative to the reference sequence corresponding to SEQ ID NO: 172, 320, 396, 616, 670, 750, or 906, or relative to the reference sequence corresponding to residues 1-359 of SEQ ID NO: 172, 320, or 396.

[0300] In some embodiments, the recombinant polynucleotide comprises a polynucleotide sequence encoding an engineered oxalate decarboxylase polypeptide comprising an amino acid sequence comprising at least a substitution at amino acid position 13, 14, 16, 17, 26, 31, 37, 60, 79, 83, 96, 162, 174, 195, 196, 210, 226, 277, 301, or 318, or combinations thereof, wherein the amino acid positions are relative to the reference sequence corresponding to SEQ ID NO: 172, 320, 396, 616, 670, 750, or 906, or relative to the reference sequence corresponding to residues 1-359 of SEQ ID NO: 172, 320, or 396.

[0301] In some embodiments, the recombinant polynucleotide comprises a polynucleotide sequence encoding an engineered oxalate decarboxylase polypeptide comprising an amino acid sequence comprising at least a substitution at amino acid position 31, 210, or 318, or combinations thereof, wherein the amino acid positions are relative to the reference sequence corresponding to SEQ ID NO: 172, 320, 396, 616, 670, 750, or 906, or relative to the reference sequence corresponding to residues 1-359 of SEQ ID NO: 172, 320, or 396.

[0302] In some embodiments, the recombinant polynucleotide comprises a polynucleotide sequence encoding an engineered oxalate decarboxylase polypeptide comprising an amino acid sequence having at least 70%, 75%, 80%, 81%, 82%, 83%, 84%, 85%, 86%, 87%, 88%, 89%, 90%, 91%, 92%, 93%, 94%, 95%, 96%, 97%, 98%, 99%, or more sequence identity to the reference sequence corresponding to residues 1-359 of SEQ ID NO: 172, or to the reference sequence corresponding to SEQ ID NO: 172, wherein the amino acid sequence comprises one or more amino acid substitutions relative to the reference sequence corresponding to residues 1-359 of SEQ ID NO: 172, or relative to the reference sequence corresponding SEQ ID NO: 172.

[0303] In some embodiments, the recombinant polynucleotide comprises a polynucleotide sequence encoding an engineered oxalate decarboxylase polypeptide comprising an amino acid sequence comprising at least a substitution or substitution set at amino acid position(s) 13, 212, 124/196/210/226, 5, 16/26/124/155/195/210/284, 196/226, 16/155/195/210/226, 16/195/210/226, 16/155/174/196, 16/195/226, 318, 16/195/196/210, 16/26/124/155/174/196/210, 195/210, 26/155/174/210, 316, 60, 16/155/174, 16/124/174/196, 16/226, 16/26/174/196/226, 17, 331, 124/195, 16/174/196, 188, 195/196/210, 174/196/210, 16/26/155/174, 16/155/195/196/226, 195/226/284, 16, 240, 16/26/124/155/195/196/226, 183/232/339/343, 183/206, 63, 173/347, 16/26/174/196, 16/284, 46, 16/124/195/196, 274, 174/196, 155/174/196, 174/196/226, 16/124/155/174/195, 16/26/155/174/196, 26/174/196/210/284, 16/195/196/284, 174, 16/124/174/195/210/226/284, 16/174/195/284, 26/174/196/210/226/284, 174/196/226/284, 124/174/196, 26/174/195/210/226, 162, 16/124/195/196/284, 206/343, 16/195/196, 16/26/174/195/196/210/226, 155/195/196/226, 18, 335, 124/155/174/195/226, 26/155/174/195/226, 195/196, 153, 155/174/195, 174/195/210/284, 174/195, 37, 124/174/195/226/284, 176, 16/155/174/195/196/226/284, 10, 169/173, 155, 33, 173/183/343/347, or 104/265, 233, wherein the amino acid positions are relative to the reference sequence corresponding to residues 1-359 of SEQ ID NO: 172, or relative to the reference sequence corresponding SEQ ID NO: 172.

[0304] In some embodiments, the recombinant polynucleotide comprises a polynucleotide sequence encoding an engineered oxalate decarboxylase polypeptide comprising an amino acid sequence having at least 70%, 75%, 80%, 85%, 86%, 87%, 88%, 89%, 90%, 91%, 92%, 93%, 94%, 95%, 96%, 97%, 98%, 99%, or more sequence identity to a reference sequence corresponding to residues 1-359 of SEQ ID NO: 320, or to the reference sequence corresponding to SEQ ID NO: 320, wherein the amino acid sequence comprises one or more amino acid substitutions relative to the reference sequence corresponding to residues 1-359 of SEQ ID NO: 320, or relative to the reference sequence corresponding to SEQ ID NO: 320.

[0305] In some embodiments, the recombinant polynucleotide comprises a polynucleotide sequence encoding an engineered oxalate decarboxylase comprising an amino acid sequence comprising at least a substitution or substitution set at amino acid position(s) 13/17/196, 17/212/331, 17/26/196/212/226, 17/26/196/212/226/331, 13/17/26/196/331, 17/60/196/226, 17/46/212, 26/60/196/226/331, 17/46/196/212/274/331, 212, 17/196/226, 13/17/26/212/331, 13/17/212/226/331, 196/212/331, 13/17/196/331, 13/17/26/212/226/331, 17/60/196/212/226/331, 13/17/212, 13/17/26/331, 13/17, 13/17/26/196, 46/196/212/226, 17/60/196, 17/196/331, 13/17/46/226/331, 17/196/226/331, 17/46/196/212/331, 17/46/212/331, 17/196, 13/17/212/226, 17/212, 17/26/212, 13/17/226/331, 17/196/212/331, 17/196/212/226/331, 13/17/26/226/331, 46/60/196/226/331, 17/46/196/331, 13/17/46/196, 196/212, 13/17/26, 17/83/263, 17/83/173/227, 17/227/301, 17/83/227/263, 17/83/125, 17/83/173, 17/263/301, 17/125, 17/83/301, 17/173, 17/83/227, 17/227, 17, 17/125/227, 17/83, 128, 76, 141, 110, 79, 117, or 61, wherein the amino acid positions are relative to the reference sequence corresponding to residues 1-359 of SEQ ID NO: 320, or relative to the reference sequence corresponding to SEQ ID NO: 320.

[0306] In some embodiments, the recombinant polynucleotide comprises a polynucleotide sequence encoding an engineered oxalate decarboxylase polypeptide comprising an amino acid sequence having at least 70%, 75%, 80%, 81%, 82%, 83%, 84%, 85%, 86%, 87%, 88%, 89%, 90%, 91%, 92%, 93%, 94%, 95%, 96%, 97%, 98%, 99%, or more sequence identity to a reference sequence corresponding to sequence of residues 1-359 of SEQ ID NO: 396, or to the reference sequence corresponding to SEQ ID NO: 396, wherein the amino acid sequence comprises one or more amino acid substitutions relative to the reference sequence corresponding to residues 1-359 of SEQ ID NO: 396, or relative to the reference sequence corresponding to SEQ ID NO: 396.

[0307] In some embodiments, the recombinant polynucleotide comprises a polynucleotide sequence encoding an engineered oxalate decarboxylase polypeptide comprising an amino acid sequence comprising at least a substitution or substitution set at amino acid position(s) 13/17/79, 13/14/17/60/79, 13/17/79/83, 13/17/79/301, 13/14/17/60/79/212, 17/60/197, 13/60/212, 13/14/17/60/79/83/301, 13/17/60/79, 17/60/301, 14/17/79, 17/60/83, 17/79, 13/17/60/79/83/301, 342, 52/190, 94/190, 190/342/351, 13/79, 13/96, 273, 126, 96, 79, 269, 40, 44, 267, 266, 160, 277, 149, 22, 234, 54, 297, 106, or 13/43, wherein the amino acid positions are relative to the reference sequence corresponding to residues 1-359 of SEQ ID NO: 396, or relative to the reference sequence corresponding to SEQ ID NO: 396.

[0308] In some embodiments, the recombinant polynucleotide comprises a polynucleotide sequence encoding an engineered oxalate decarboxylase polypeptide comprising an amino acid sequence having at least 70%, 75%, 80%, 81%, 82%, 83%, 84%, 85%, 86%, 87%, 88%, 89%, 90%, 91%, 92%, 93%, 94%, 95%, 96%, 97%, 98%, 99%, or more sequence identity to the reference sequence corresponding to SEQ ID NO: 670, wherein the amino acid sequence comprises one or more amino acid substitutions relative to the reference sequence corresponding to SEQ ID NO: 670.

[0309] In some embodiments, the recombinant polynucleotide comprises a polynucleotide sequence encoding an engineered oxalate decarboxylase polypeptide comprising an amino acid sequence comprising at least a substitution at amino acid position 37, 125, 162, 94, 195, 85, 103, 232, 189, 186, 155, 193, 342, 196, 63, 33, 351, 314, 187, 303, 164, 153, 346, 183, 19, 123, 350, 205, 284, 199, 343, 200, 208, 169, 190, or 121, or combinations thereof, wherein the amino acid positions are relative to the reference sequence corresponding to SEQ ID NO: 670.

[0310] In some embodiments, the recombinant polynucleotide comprises a polynucleotide sequence encoding an engineered oxalate decarboxylase polypeptide comprising an amino acid sequence having at least 70%, 75%, 80%, 81%, 82%, 83%, 84%, 85%, 86%, 87%, 88%, 89%, 90%, 91%, 92%, 93%, 94%, 95%, 96%, 97%, 98%, 99%, or more sequence identity to the reference sequence corresponding to SEQ ID NO: 616, wherein the amino acid sequence comprises one or more amino acid substitutions relative to the reference sequence corresponding to SEQ ID NO: 616.

[0311] In some embodiments, the recombinant polynucleotide comprises a polynucleotide sequence encoding an engineered oxalate decarboxylase polypeptide comprising an amino acid sequence comprising at least a substitution or substitution set at amino acid position(s) 14/26/60/318, 14/26/60/94/162/212, 60/162/226, 60, 14/125/162/212/318, 60/125/226, 14/125/162/226, 26/60/162/226/318, 14/26/94/162/212/226, 14/60/162, 14/60/162/226, 14/94/162/318, 14/94/162, 14/60/226, 14/60/94/212, 14/60/162/212, 14/162, 14/94/212/318, 14/60, 14/26/162, 14, 14/318, 14/162/226/318, 14/125/212, 14/125/226/318, 14/26/60/162, 14/125/162/212/226, 14/94/125/162/318, 14/125/226, 277, 166, 233, 83, 5, 342, 96, 284, or 26, wherein the amino acid positions are relative to the reference sequence corresponding SEQ ID NO: 616.

[0312] In some embodiments, the recombinant polynucleotide comprises a polynucleotide sequence encoding an engineered oxalate decarboxylase polypeptide comprising an amino acid sequence having at least 70%, 75%, 80%, 81%, 82%, 83%, 84%, 85%, 86%, 87%, 88%, 89%, 90%, 91%, 92%, 93%, 94%, 95%, 96%, 97%, 98%, 99%, or more sequence identity to the reference sequence corresponding to SEQ ID NO: 750, wherein the amino acid sequence comprises one or more amino acid substitutions relative to the reference sequence corresponding to SEQ ID NO: 750.

[0313] In some embodiments, the recombinant polynucleotide comprises a polynucleotide sequence encoding an engineered oxalate decarboxylase polypeptide comprising an amino acid sequence comprising at least a substitution or substitution set at amino acid position(s) 5/26/83/342, 5/26/277, 5/96/277, 5/83/277/342, 26/83/277, 5/26/83/277, 5/277/342, 5/26/166/277, 83/277/342, 83/96/277/342, 83/96/277, 26/83/277/342, 5/26/83/277/342, 5/83/277, 26/277, 83/277, 5/35/277, 5/26/83/96/277, 5/26/96/277, 5/277, 5/166/277, 26/83/96/277/342, 277, 26/277/342, 5, or 5/83/96/277/342, wherein the amino acid positions are relative to the reference sequence corresponding to SEQ ID NO: 750.

[0314] In some embodiments, the recombinant polynucleotide comprises a polynucleotide sequence encoding an engineered oxalate decarboxylase polypeptide comprising an amino acid sequence having at least 70%, 75%, 80%, 81%, 82%, 83%, 84%, 85%, 86%, 87%, 88%, 89%, 90%, 91%, 92%, 93%, 94%, 95%, 96%, 97%, 98%, 99%, or more sequence identity to the reference sequence corresponding to SEQ ID NO: 906, wherein the amino acid sequence comprises one or more amino acid substitutions relative to the reference sequence corresponding to SEQ ID NO: 906.

[0315] In some embodiments, the recombinant polynucleotide comprises a polynucleotide sequence encoding an engineered oxalate decarboxylase polypeptide comprising an amino acid sequence comprising at least a substitution at amino acid position 26, 31, 96, 60, 318, 210, 277, 37, 16, 195, 79, 17, 13, 83, 162, or 174, or combinations thereof, wherein the amino acid positions are relative to the reference sequence corresponding to SEQ ID NO: 906.

[0316] In some embodiments, the recombinant polynucleotide comprises a polynucleotide sequence encoding an engineered oxalate decarboxylase polypeptide comprising an amino acid sequence comprising at least a substitution or substitution set at amino acid position(s) 174/318, 26/96, 60/318, 31/318, 162/174/318, 174/277/318, 26/195/318, 60/162/195, 60/162/318, 174/195/277, 16/17/174, 60/195/277, 37/277/318, 16/162/195/277, 26/79/83/162, 26/31/60/318, 16/174/195/277, 13/3⅞3/162, 16/17/60/195, 13/17/37/83, 31/37/162/174/318, 13/16/31/83/162, 16/60/174/195/318, 17/60/96/162/195/277, 13/26/60/83/162/174, 17/31/60/162/174/277, 16/17/26/83/96/277, 17/26/37/174/277/318, 13/16/31/60/162/174, 13/17/31/83/277/318, 13/16/17/31/83/162/318, 13/16/60/83/162/195/318, 13/16/17/31/37/83/96/162, 13/17/26/37/60/83/162/210/318, 13/16/26/31/83/96/162/174/318, 13/16/17/31/60/83/96/162/174/195/318, 13/16/26/37/60/83/162/174/195/210/318, 13/16/37/79/83/96/162/174/195/210/277, 13/17/26/31/37/60/79/83/96/162/174/210, 13/16/17/26/37/79/83/96/174/195/210/318, 13/26/31/37/60/83/96/162/174/195/210/277/318, 13/16/17/31/37/60/79/83/96/162/174/195/210/318, 13/16/17/31/60/79/83/96/162/174/195/210/277/318, 13/16/17/26/37/60/79/96/162/174/195/210/277/318, 13/26/31/37/60/79/83/96/162/174/195/210/277/318, 13/16/17/26/3⅓7/60/96/162/174/195/210/277/318, 13/16/17/26/31/37/79/83/96/162/174/195/210/318, 13/16/17/26/31/37/60/79/96/162/174/210/277/318, 13/17/26/31/37/60/79/83/96/162/174/195/210/277/318, 13/16/26/31/37/60/79/83/96/162/174/195/210/277/318, 16/17/26/31/37/60/79/83/96/162/174/195/210/277/318, or 13/16/17/26/31/37/60/79/83/96/162/174/195/210/277/318, wherein the amino acid positions are relative to the reference sequence corresponding to SEQ ID NO: 906.

[0317] In some embodiments, the recombinant polynucleotide comprises a polynucleotide sequence encoding the engineered oxalate decarboxylase polypeptide comprising an amino acid sequence comprising at least a substitution at an amino acid position set forth in Tables 4-1, 4-2, 4-3, 4-4, 4-5, 4-6, 4-7, 5-1, and 5-2, wherein the amino acid positions are relative to the reference sequence corresponding to SEQ ID NO: 172, 320, 396, 616, 670, 750, or 906, or relative to the reference sequence corresponding to residues 1-359 of SEQ ID NO: 172, 320, or 396.

[0318] In some embodiments, the recombinant polynucleotide comprises a polynucleotide sequence encoding the engineered oxalate decarboxylase polypeptide comprising an amino acid sequence comprising at least a substitution set forth in Tables 4-1, 4-2, 4-3, 4-4, 4-5, 4-6, 4-7, 5-1, and 5-2, wherein the amino acid positions are relative to the reference sequence corresponding to SEQ ID NO: 172, 320, 396, 616, 670, 750, or 906, or relative to the reference sequence corresponding to residues 1-359 of SEQ ID NO: 172, 320, or 396.

[0319] In some embodiments, the recombinant polynucleotide comprises a polynucleotide sequence encoding the engineered oxalate decarboxylase polypeptide comprising an amino acid sequence comprising at least a substitution or substitution set at amino acid position(s) set forth in Tables 4-1, 4-2, 4-3, 4-4, 4-5, 4-6, 4-7, 5-1, and 5-2, wherein the amino acid positions are relative to the reference sequence corresponding to SEQ ID NO: 172, 320, 396, 616, 670, 750, or 906, or relative to the reference sequence corresponding to residues 1-359 of SEQ ID NO: 172, 320, or 396.

[0320] In some embodiments, the recombinant polynucleotide comprises a polynucleotide sequence encoding the engineered oxalate decarboxylase polypeptide comprising an amino acid sequence comprising at least a substitution or substitution set of an oxalate decarboxylase polypeptide set forth in Tables 4-1, 4-2, 4-3, 4-4, 4-5, 4-6, 4-7, 5-1, and 5-2, wherein the amino acid positions are relative to the reference sequence corresponding to SEQ ID NO: 172, 320, 396, 616, 670, 750, or 906, or relative to the reference sequence corresponding to residues 1-359 of SEQ ID NO: 172, 320, or 396.

[0321] In some embodiments, the recombinant polynucleotide comprises a polynucleotide sequence encoding an engineered oxalate decarboxylase polypeptide comprising: an amino acid sequence comprising SEQ ID NO: 4; an amino acid sequence corresponding to residues 1-359 of an even-numbered SEQ ID NO. of SEQ ID NOs: 28-614; an amino acid sequence comprising an even-numbered SEQ ID NO. of SEQ ID NOs: 28-614; or an amino acid sequence comprising an even-numbered SEQ ID NO. of SEQ ID NOs: 616-1622, optionally wherein the amino acid sequence includes 1, 2, 3, 4, 5, 6, 7, 8, 9, or up to 10 substitutions. In some embodiments, the encoded engineered oxalate decarboxylase polypeptide optionally includes 1, 2, 3, 4, or 5 substitutions.

[0322] In some embodiments, the recombinant polynucleotide comprises a polynucleotide sequence encoding an engineered oxalate decarboxylase polypeptide comprising an amino acid sequence comprising residues 1-359 of SEQ ID NO: 172, 320, or 396, or comprising SEQ ID NO: 172, 320, 396, 616, 670, 750, or 906, optionally wherein the amino acid sequence includes 1, 2, 3, 4, 5, 6, 7, 8, 9, or up to 10 substitutions. In some embodiments, the encoded engineered oxalate decarboxylase polypeptide optionally includes 1, 2, 3, 4, or 5 substitutions.

[0323] In some embodiments, the recombinant polynucleotide comprises a polynucleotide sequence having at least 70%, 75%, 80%, 81%, 82%, 83%, 84%, 85%, 86%, 87%, 88%, 89%, 90%, 91%, 92%, 93%, 94%, 95%, 96%, 97%, 98%, 99%, or more sequence identity to: a reference polynucleotide sequence corresponding to SEQ ID NO: 3; a reference polynucleotide sequence corresponding to nucleotide residues 1-1077 of an odd-numbered SEQ ID NO. of SEQ ID NOs: 27-613; a reference polynucleotide sequence corresponding to an odd-numbered SEQ ID NO. of SEQ ID NOs: 27-613; or a reference polynucleotide sequence corresponding to an odd-numbered SEQ ID NO. of SEQ ID NOs: 615-1621, wherein the recombinant polynucleotide encodes an engineered oxalate decarboxylase polypeptide.

[0324] In some embodiments, the recombinant polynucleotide comprising a polynucleotide sequence having at least 70%, 75%, 80%, 81%, 82%, 83%, 84%, 85%, 86%, 87%, 88%, 89%, 90%, 91%, 92%, 93%, 94%, 95%, 96%, 97%, 98%, 99%, or more sequence identity to a reference polynucleotide sequence corresponding to SEQ ID NO: 33, 171, 319, 395, 615, 669, 749, or 905, or to a reference polynucleotide sequence corresponding to nucleotide residues 1-1077 of SEQ ID NO: 171, 319, or 395, wherein the recombinant polynucleotide encodes an engineered oxalate decarboxylase polypeptide.

[0325] In some embodiments, the recombinant polynucleotide comprises a polynucleotide sequence which is codon-optimized. In some embodiments, the polynucleotide sequence is codon optimized for expression in a bacterial cell, fungal cell, or mammalian cell.

[0326] In some embodiments, the recombinant polynucleotide comprises a polynucleotide sequence comprising SEQ ID NO: 1 or 3; a polynucleotide sequence comprising nucleotide residues 1-1077 of an odd-numbered SEQ ID NO. of SEQ ID NOs: 27-613; a polynucleotide sequence comprising an odd-numbered SEQ ID NO. of SEQ ID NOs: 27-613; or a polynucleotide sequence comprising an odd-numbered SEQ ID NO. of SEQ ID NOs: 615-1621.

[0327] In some embodiments, the recombinant polynucleotide hybridizes under highly stringent conditions to a reference polynucleotide sequence described herein encoding an engineered oxalate decarboxylase e.g., a recombinant polynucleotide provided in Tables 4-1, 4-2, 4-3, 4-4, 4-5, 4-6, 4-7, 5-1, and 5-2, or a reverse complement thereof. In some embodiments, the reference polynucleotide sequence corresponds to SEQ ID NO: 1 or 3; a polynucleotide sequence corresponding to nucleotide residues 1-1077 of an odd-numbered SEQ ID NO. of SEQ ID NOs: 27-613; a polynucleotide sequence corresponding to an odd-numbered SEQ ID NO. of SEQ ID NOs: 27-613; or a polynucleotide sequence corresponding to an odd-numbered SEQ ID NO. of SEQ ID NOs: 615-1621, or a reverse complement thereof, or a polynucleotide sequence encoding any of the other engineered oxalate decarboxylase provided herein. In some embodiments, the recombinant polynucleotide encodes an engineered oxalate decarboxylase and hybridizes under highly stringent conditions to a reverse complement of a reference polynucleotide sequence corresponding to SEQ ID NO: 1 or 3; a polynucleotide sequence corresponding to nucleotide residues 1-1077 of an odd-numbered SEQ ID NO. of SEQ ID NOs: 27-613; a polynucleotide sequence corresponding to an odd-numbered SEQ ID NO. of SEQ ID NOs: 27-613; or a polynucleotide sequence corresponding to an odd-numbered SEQ ID NO. of SEQ ID NOs: 615-1621.

[0328] In some embodiments, the recombinant polynucleotide hybridizes under highly stringent conditions to a reverse complement of a reference polynucleotide sequence encoding an engineered oxalate decarboxylase polypeptide, wherein the engineered oxalate decarboxylase polypeptide comprises an amino acid sequence having one or more amino acid differences relative to the reference sequence corresponding to SEQ ID NO: 2, 4, 172, 320, 396, 616, 670, 750, or 906, or relative to the reference sequence corresponding to residues 1-359 of SEQ ID NO: 172, 320, or 396, at residue positions selected from any positions as set forth in Tables 4-1, 4-2, 4-3, 4-4, 4-5, 4-6, 4-7, 5-1, and 5-2. In some embodiments, the polynucleotide that hybridizes under highly stringent conditions comprises a polynucleotide sequence having at least 70%, 75%, 80%, 81%, 82%, 83%, 84%, 85%, 86%, 87%, 88%, 89%, 90%, 91%, 92%, 93%, 94%, 95%, 96%, 97%, 98%, 99% or more sequence identity to a reference polynucleotide sequence corresponding to SEQ ID NO: 1 or 3; a polynucleotide sequence corresponding to nucleotide residues 1-1077 of an odd-numbered SEQ ID NO. of SEQ ID NOs: 27-613; a polynucleotide sequence corresponding to an odd-numbered SEQ ID NO. of SEQ ID NOs: 27-613; or a polynucleotide sequence corresponding to an odd-numbered SEQ ID NO. of SEQ ID NOs: 615-1621. In some additional embodiments, the polynucleotide that hybridizes under highly stringent conditions comprises a polynucleotide sequence having at least 75%, 80%, 81%, 82%, 83%, 84%, 85%, 86%, 87%, 88%, 89%, 90%, 91%, 92%, 93%, 94%, 95%, 96%, 97%, 98%, 99% or more sequence identity to a reference polynucleotide sequence corresponding to a polynucleotide sequence set forth in Tables 4-1, 4-2, 4-3, 4-4, 4-5, 4-6, 4-7, 5-1, and 5-2.

[0329] In some embodiments, the recombinant polynucleotide comprises a polynucleotide sequence encoding an engineered oxalate decarboxylase polypeptide comprising an amino acid sequence having at least 70%, 75%, 80%, 81%, 82%, 83%, 84%, 85%, 86%, 87%, 88%, 89%, 90%, 91%, 92%, 93%, 94%, 95%, 96%, 97%, 98%, 99%, or more sequence identity to a reference amino acid sequence corresponding to SEQ ID NO: 6, 8, 10, 12, 14, 16, 18, 20, 22, 24, or 26, or to a reference amino acid sequence corresponding to residues 1-424 of SEQ ID NO: 6.

[0330] In some embodiments, the recombinant polynucleotide comprises a polynucleotide sequence encoding the engineered oxalate decarboxylase polypeptide comprising an amino acid sequence having at least 70%, 75%, 80%, 81%, 82%, 83%, 84%, 85%, 86%, 87%, 88%, 89%, 90%, 91%, 92%, 93%, 94%, 95%, 96%, 97%, 98%, 99%, or more sequence identity to a reference amino acid sequence corresponding to SEQ ID NO: 4, 6, 8, 10, 12, 14, 16, 18, 20, 22, 24, or 26, or to a reference amino acid sequence corresponding to residues 1-424 of SEQ ID NO: 6, wherein the amino acid sequence comprises one or more substitutions in its amino acid sequence.

[0331] In some embodiments, the recombinant polynucleotide comprises a polynucleotide sequence encoding the engineered oxalate decarboxylase polypeptide comprising an amino acid sequence comprising SEQ ID NO: 4, 6, 8, 10, 12, 14, 16, 18, 20, 22, 24, or 26, or an amino acid comprising residues 1-424 of SEQ ID NO: 6.

[0332] In some embodiments, the recombinant polynucleotide comprises a polynucleotide sequence having at least 70%, 75%, 80%, 81%, 82%, 83%, 84%, 85%, 86%, 87%, 88%, 89%, 90%, 91%, 92%, 93%, 94%, 95%, 96%, 97%, 98%, 99%, or more sequence identity to a reference polynucleotide sequence corresponding to SEQ ID NO: 5, 7, 9, 11, 13, 15, 17, 19, 21, 23, or 25, or to a reference polynucleotide sequence corresponding to nucleotide residues 1-1272 of SEQ ID NO: 5, wherein the recombinant polynucleotide encodes an oxalate decarboxylase.

[0333] In some embodiments, the recombinant polynucleotide comprises a polynucleotide sequence comprising SEQ ID NO: 5, 7, 9, 11, 13, 15, 17, 19, 21, 23, or 25, or comprising nucleotide residues 1-1272 of SEQ ID NO: 5.

[0334] In some embodiments, a recombinant polynucleotide encoding any of the engineered oxalate decarboxylase polypeptides herein is manipulated in a variety of ways to facilitate expression of the engineered polypeptide. In some embodiments, the polynucleotides encoding the polypeptides are provided as expression vectors where one or more control sequences is present to regulate the expression of the polynucleotides and/or polypeptides. In some embodiments, the recombinant expression vector comprises a polynucleotide encoding an engineered oxalate decarboxylase polypeptide, and one or more expression regulating regions such as a promoter and a terminator, a replication origin, etc., depending on the type of hosts into which they are to be introduced. The techniques for modifying polynucleotides and nucleic acid sequences utilizing recombinant DNA methods are well known in the art.

[0335] In some embodiments, the control sequences include among others, promoters, leader sequences, polyadenylation sequences, propeptide sequences, signal peptide sequences, and transcription terminators. In some embodiments, suitable promoters are selected based on the host cells selection. For bacterial host cells, suitable promoters for directing transcription of the nucleic acid constructs of the present disclosure, include, but are not limited to promoters obtained from the E. coli lac operon, Streptomyces coelicolor agarase gene (dagA), Bacillus subtilis levansucrase gene (sacB), Bacillus licheniformis alpha-amylase gene (amyL), Bacillus stearothermophilus maltogenic amylase gene (amyM), Bacillus amyloliquefaciens alpha-amylase gene (amyQ), Bacillus licheniformis penicillinase gene (penP), Bacillus subtilis xylA and xylB genes, and prokaryotic beta-lactamase gene (See e.g., Villa-Kamaroff et al., Proc. Natl Acad. Sci. USA, 1978, 75:3727-3731), as well as the tac promoter (See e.g., DeBoer et al., Proc. Natl Acad. Sci. USA, 1983, 80: 21-25). Exemplary promoters for filamentous fungal host cells, include, but are not limited to promoters obtained from the genes for Aspergillus oryzae TAKA amylase, Rhizomucor miehei aspartic proteinase, Aspergillus niger neutral alpha-amylase, Aspergillus niger acid stable alpha- amylase, Aspergillus niger or Aspergillus awamori glucoamylase (glaA), Rhizomucor miehei lipase, Aspergillus oryzae alkaline protease, Aspergillus oryzae triose phosphate isomerase, Aspergillus nidulans acetamidase, and Fusarium oxysporum trypsin-like protease (See e.g., WO 96/00787), as well as the NA2-tpi promoter (a hybrid of the promoters from the genes for Aspergillus niger neutral alpha-amylase and Aspergillus oryzae triose phosphate isomerase), and mutant, truncated, and hybrid promoters thereof. Exemplary yeast cell promoters can be from the genes can be from the genes for Saccharomyces cerevisiae enolase (ENO-1), Saccharomyces cerevisiae galactokinase (GAL1), Saccharomyces cerevisiae alcohol dehydrogenase/glyceraldehyde-3-phosphate dehydrogenase (ADH2/GAP), and Saccharomyces cerevisiae 3-phosphoglycerate kinase. Other useful promoters for yeast host cells are known in the art (See e.g., Romanos et al., Yeast, 1992, 8:423-488). Exemplary promoters for use in mammalian cells include, but are not limited to, those from cytomegalovirus (CMV), chicken β-actin promoter fused with the CMV enhancer, Simian vacuolating virus 40 (SV40), from Homo sapiens phosphoglycerate kinase, beta actin, elongation factor-1a or glyceraldehyde-3-phosphate dehydrogenase, or from Gallus β-actin.

[0336] In some embodiments, the control sequence is a suitable transcription terminator sequence, a sequence recognized by a host cell to terminate transcription. The terminator sequence is operably linked to the 3′ terminus of the nucleic acid sequence encoding the engineered oxalate decarboxylase polypeptide. Any terminator which is functional in the host cell of choice finds use in the present invention. For example, exemplary transcription terminators for filamentous fungal host cells can be obtained from the genes for Aspergillus oryzae TAKA amylase, Aspergillus niger glucoamylase, Aspergillus nidulans anthranilate synthase, Aspergillus niger alpha-glucosidase, and Fusarium oxysporum trypsin-like protease. Exemplary terminators for yeast host cells can be obtained from the genes for Saccharomyces cerevisiae enolase, Saccharomyces cerevisiae cytochrome C (CYC1), and Saccharomyces cerevisiae glyceraldehyde-3-phosphate dehydrogenase. Other useful terminators for yeast host cells are known in the art (See e.g., Romanos et al., supra). Exemplary terminators for mammalian cells include, but are not limited to, those from cytomegalovirus (CMV), Simian virus 40 (SV40), from Homo sapiens growth hormone hGH, from bovine growth hormone BGH, and from human or rabbit beta globulin.

[0337] In some embodiments, the control sequence is a suitable leader sequence, 5′-cap modification, 5′ UTR, etc. In some embodiments, these regulatory sequence elements mediate binding to molecules involved in mRNA trafficking and translation, inhibit 5′-exonucleolytic degradation and confer resistance to de-capping. The leader sequence is operably linked to the 5′ terminus of the nucleic acid sequence encoding the engineered oxalate decarboxylase polypeptide. Any leader sequence that is functional in the host cell of choice may be used. Exemplary leaders for filamentous fungal host cells are obtained from the genes for Aspergillus oryzae TAKA amylase and Aspergillus nidulans triose phosphate isomerase. Suitable leaders for yeast host cells include, but are not limited to, those obtained from the genes for Saccharomyces cerevisiae enolase (ENO-1), Saccharomyces cerevisiae 3-phosphoglycerate kinase, Saccharomyces cerevisiae alpha-factor, and Saccharomyces cerevisiae alcohol dehydrogenase/glyceraldehyde-3-phosphate dehydrogenase (ADH2/GAP). Suitable leaders for mammalian host cells include but are not limited to the 5′-UTR element present in orthopoxvirus mRNA.

[0338] In some embodiments, the control sequence comprises a 3′ untranslated nucleic acid region and/or polyadenylation tail nucleic acid sequence, sequences operably linked to the 3′ terminus of the protein coding nucleic acid sequence which mediate binding to proteins involved in mRNA trafficking and translation and mRNA half-life. Any polyadenylation sequence and 3′ UTR which is functional in the host cell of choice may be used in the present invention. Exemplary polyadenylation sequences for filamentous fungal host cells include, but are not limited to those from the genes for Aspergillus oryzae TAKA amylase, Aspergillus niger glucoamylase, Aspergillus nidulans anthranilate synthase, Fusarium oxysporum trypsin-like protease, and Aspergillus niger alpha-glucosidase. Useful polyadenylation sequences for yeast host cells are also known in the art (See e.g., Guo and Sherman, Mol. Cell. Biol., 1995, 15:5983-5990). Useful polyadenylation and 3′ UTR sequences for mammalian host cells include, but are not limited to, the 3′-UTRs of α- and β-globin mRNAs that harbor several sequence elements that increase the stability and translation of mRNA.

[0339] In some embodiments, the control sequence is also a polyadenylation sequence (i.e., a sequence operably linked to the 3′ terminus of the nucleic acid sequence and which, when transcribed, is recognized by the host cell as a signal to add polyadenosine residues to transcribed mRNA). Any suitable polyadenylation sequence which is functional in the host cell of choice finds use in the present invention. Exemplary polyadenylation sequences for filamentous fungal host cells include, but are not limited to, the genes for Aspergillus oryzae TAKA amylase, Aspergillus niger glucoamylase, Aspergillus nidulans anthranilate synthase, Fusarium oxysporum trypsin-like protease, and Aspergillus niger alpha-glucosidase. Useful polyadenylation sequences for yeast host cells are known (See e.g., Guo and Sherman, Mol. Cell. Bio., 1995, 15:5983-5990).

[0340] In some embodiments, the control sequence is also a signal peptide (i.e., a coding region that codes for an amino acid sequence linked to the amino terminus of a polypeptide and directs the encoded polypeptide into the cell’s secretory pathway). In some embodiments, the 5′ end of the coding sequence of the nucleic acid sequence inherently contains a signal peptide coding region naturally linked in translation reading frame with the segment of the coding region that encodes the secreted polypeptide. Alternatively, in some embodiments, the 5′ end of the coding sequence contains a signal peptide coding region that is foreign to the coding sequence. Any suitable signal peptide coding region which directs the expressed polypeptide into the secretory pathway of a host cell of choice finds use for expression of the engineered polypeptide(s). Effective signal peptide coding regions for bacterial host cells are the signal peptide coding regions include, but are not limited to those obtained from the genes for Bacillus NClB 11837 maltogenic amylase, Bacillus stearothermophilus alpha-amylase, Bacillus licheniformis subtilisin, Bacillus licheniformis beta-lactamase, Bacillus stearothermophilus neutral proteases (nprT, nprS, nprM), and Bacillus subtilis prsA. Further signal peptides are known in the art (See e.g., Simonen and Palva, Microbiol. Rev., 1993, 57:109-137). In some embodiments, effective signal peptide coding regions for filamentous fungal host cells include, but are not limited to, the signal peptide coding regions obtained from the genes for Aspergillus oryzae TAKA amylase, Aspergillus niger neutral amylase, Aspergillus niger glucoamylase, Rhizomucor miehei aspartic proteinase, Humicola insolens cellulase, and Humicola lanuginosa lipase. Useful signal peptides for yeast host cells include, but are not limited to, those from the genes for Saccharomyces cerevisiae alpha-factor and Saccharomyces cerevisiae invertase. Useful signal peptides for mammalian host cells include but are not limited to those from the genes for immunoglobulin gamma (IgG). In some embodiments, the signal peptide is a signal peptide of a protein expressed in human cells.

[0341] In some embodiments, the control sequence is also a propeptide coding region that codes for an amino acid sequence positioned at the amino terminus of a polypeptide. The resultant polypeptide is referred to as a “proenzyme,” “propolypeptide,” or “zymogen.” A propolypeptide can be converted to a mature active polypeptide by catalytic or autocatalytic cleavage of the propeptide from the propolypeptide. The propeptide coding region may be obtained from any suitable source, including, but not limited to the genes for Bacillus subtilis alkaline protease (aprE), Bacillus subtilis neutral protease (nprT), Saccharomyces cerevisiae alpha-factor, Rhizomucor miehei aspartic proteinase, and Myceliophthora thermophila lactase (See e.g., WO 95/33836). Where both signal peptide and propeptide regions are present at the amino terminus of a polypeptide, the propeptide region is positioned next to the amino terminus of a polypeptide and the signal peptide region is positioned next to the amino terminus of the propeptide region.

[0342] In some embodiments, regulatory sequences are also utilized. These sequences facilitate the regulation of the expression of the polypeptide relative to the growth of the host cell. Examples of regulatory systems are those that cause the expression of the gene to be turned on or off in response to a chemical or physical stimulus, including the presence of a regulatory compound. In prokaryotic host cells, suitable regulatory sequences include, but are not limited to the lac, tac, and trp operator systems. In yeast host cells, suitable regulatory systems include, but are not limited to the ADH2 system or GAL1 system. In filamentous fungi, suitable regulatory sequences include, but are not limited to the TAKA alpha-amylase promoter, Aspergillus niger glucoamylase promoter, and Aspergillus oryzae glucoamylase promoter.

[0343] In the embodiments herein, the recombinant expression vector may be any suitable vector (e.g., a plasmid or virus), that can be conveniently subjected to recombinant DNA procedures and bring about the expression of the engineered oxalate decarboxylase polynucleotide sequence, and/or expression of the encoded engineered oxalate decarboxylase polypeptide. The choice of the vector typically depends on the compatibility of the vector with the host cell into which the vector is to be introduced. The vectors may be linear or closed circular plasmids.

[0344] In some embodiments, the expression vector is an autonomously replicating vector (i.e., a vector that exists as an extra-chromosomal entity, the replication of which is independent of chromosomal replication, such as a plasmid, an extra-chromosomal element, a minichromosome, or an artificial chromosome). The vector may contain any means for assuring self-replication. In some alternative embodiments, the vector is one in which, when introduced into the host cell, it is integrated into the genome and replicated together with the chromosome(s) into which it has been integrated. Furthermore, in some embodiments, a single vector or plasmid, or two or more vectors or plasmids which together contain the total DNA to be introduced into the genome of the host cell, and/or a transposon is utilized.

[0345] In some embodiments, the expression vector contains one or more selectable markers, which permit easy selection of transformed cells. A “selectable marker” is a gene, the product of which provides for biocide or viral resistance, resistance to heavy metals, prototrophy to auxotrophs, and the like. Examples of bacterial selectable markers include, but are not limited to, the dal genes from Bacillus subtilis or Bacillus licheniformis, or markers, which confer antibiotic resistance such as ampicillin, kanamycin, chloramphenicol or tetracycline resistance. Suitable markers for yeast host cells include, but are not limited to ADE2, HIS3, LEU2, LYS2, MET3, TRP1, and URA3. Selectable markers for use in filamentous fungal host cells include, but are not limited to, amdS (acetamidase; e.g., from A. nidulans or A. orzyae), argB (ornithine carbamoyltransferases), bar (phosphinothricin acetyltransferase; e.g., from S. hygroscopicus), hph (hygromycin phosphotransferase), niaD (nitrate reductase), pyrG (orotidine-5′-phosphate decarboxylase; e.g., from A. nidulans or A. orzyae), sC (sulfate adenyltransferase), and trpC (anthranilate synthase), as well as equivalents thereof.

[0346] In another aspect, the present disclosure provides a host cell comprising at least one recombinant polynucleotide or an expression vector encoding at least one engineered ODC polypeptide of the present invention, the polynucleotide(s) being operatively linked to one or more control sequences for expression of the engineered ODC enzyme(s) in the host cell. Host cells suitable for use in expressing the polypeptides encoded by the expression vectors described herein are well known in the art and include but are not limited to, bacterial cells, such as E. coli, Vibrio fluvialis, Streptomyces and Salmonella typhimurium cells; fungal cells, such as yeast cells (e.g., Saccharomyces cerevisiae or Pichia pastoris (ATCC Accession No. 201178)); insect cells such as Drosophila S2 and Spodoptera Sf9 cells; animal cells such as CHO, COS, BHK, 293, and Bowes melanoma cells; and plant cells. Exemplary host cells also include various Escherichia coli strains (e.g., W3110 (ΔfhuA) and BL21).

[0347] In another aspect, the present disclosure provides a method of producing the engineered oxalate decarboxylase polypeptide, where the method comprises culturing a host cell capable of expressing a polynucleotide encoding the engineered oxalate decarboxylase polypeptide under conditions suitable for expression of the encoded polypeptide. In some embodiments, the method further comprises a step of isolating or recovering the expressed engineered oxalate decarboxylase polypeptide, e.g., from the culture and/or cells. In some embodiments, the method further comprises a step of purifying the expressed oxalate decarboxylase polypeptide. Purification of the polypeptide can use methods known in the art, including, by way of example and not limitation, precipitation and/or chromatography.

[0348] Chromatographic techniques for isolation/purification of the oxalate polypeptides include, among others, reverse phase chromatography, high-performance liquid chromatography, ionexchange chromatography, hydrophobic-interaction chromatography, size-exclusion chromatography, gel electrophoresis, and affinity chromatography. Conditions for purifying a particular enzyme depend, in part, on factors such as net charge, hydrophobicity, hydrophilicity, molecular weight, molecular shape, etc., and will be apparent to those having skill in the art. In some embodiments, affinity techniques may be used to isolate the engineered oxalate decarboxylase polypeptide. In some embodiments, the affinity chromatography can use a tag on the polypeptide, such as a his-tag. In some embodiments, the affinity chromatography can use any antibody that specifically binds an engineered oxalate decarboxylase polypeptide of interest. For the production of antibodies, various host animals, including but not limited to rabbits, mice, rats, etc., are immunized with an engineered oxalate decarboxylase polypeptide, or a fragment thereof. In some embodiments, the engineered oxalate decarboxylase polypeptide or fragment for immunization is attached to a suitable carrier, such as BSA, by means of a side chain functional group or linkers attached to a side chain functional group for immunizing an animal.

[0349] Appropriate culture media and growth conditions for host cells are well known in the art. It is contemplated that any suitable method for introducing polynucleotides for expression of the ODC polypeptides into cells will find use in the present invention. Suitable techniques include, but are not limited to electroporation, biolistic particle bombardment, liposome mediated transfection, calcium chloride transfection, and protoplast fusion.

[0350] The engineered oxalate decarboxylase polypeptides with the properties disclosed herein can be obtained by subjecting the polynucleotide encoding the naturally occurring or engineered oxalate decarboxylase polypeptide to any suitable mutagenesis and/or directed evolution methods known in the art, and/or as described herein. An exemplary directed evolution technique is mutagenesis and/or DNA shuffling (See e.g., Stemmer, Proc. Natl. Acad. Sci. USA, 1994, 91:10747-10751; WO 95/22625; WO 97/0078; WO 97/35966; WO 98/27230; WO 00/42651; WO 01/75767 and U.S. Pat. 6,537,746). Other directed evolution procedures that can be used include, among others, staggered extension process (StEP), in vitro recombination (See e.g., Zhao et al., Nat. Biotechnol., 1998, 16:258-261), mutagenic PCR (See e.g., Caldwell et al., PCR Methods Appl., 1994, 3:S136-S140), and cassette mutagenesis (See e.g., Black et al., Proc. Natl. Acad. Sci. USA, 1996, 93:3525-3529).

[0351] For example, mutagenesis and directed evolution methods can be readily applied to oxalate decarboxylase encoding polynucleotides to generate variant libraries that can be expressed, screened, and assayed. Any suitable mutagenesis and directed evolution methods find use in the present invention and are well known in the art (See e.g., U.S. Pat. Nos, 5,605,793, 5,811,238, 5,830,721, 5,834,252, 5,837,458, 5,928,905, 6,096,548, 6,117,679, 6,132,970, 6,165,793, 6,180,406, 6,251,674, 6,265,201, 6,277,638, 6,287,861, 6,287,862, 6,291,242, 6,297,053, 6,303,344, 6,309,883, 6,319,713, 6,319,714, 6,323,030, 6,326,204, 6,335,160, 6,335,198, 6,344,356, 6,352,859, 6,355,484, 6,358,740, 6,358,742, 6,365,377, 6,365,408, 6,368,861, 6,372,497, 6,337,186, 6,376,246, 6,379,964, 6,387,702, 6,391,552, 6,391,640, 6,395,547, 6,406,855, 6,406,910, 6,413,745, 6,413,774, 6,420,175, 6,423,542, 6,426,224, 6,436,675, 6,444,468, 6,455,253, 6,479,652, 6,482,647, 6,483,011, 6,484,105, 6,489,146, 6,500,617, 6,500,639, 6,506,602, 6,506,603, 6,518,065, 6,519,065, 6,521,453, 6,528,311, 6,537,746, 6,573,098, 6,576,467, 6,579,678, 6,586,182, 6,602,986, 6,605,430, 6,613,514, 6,653,072, 6,686,515, 6,703,240, 6,716,631, 6,825,001, 6,902,922, 6,917,882, 6,946,296, 6,961,664, 6,995,017, 7,024,312, 7,058,515, 7,105,297, 7,148,054, 7,220,566, 7,288,375, 7,384,387, 7,421,347, 7,430,477, 7,462,469, 7,534,564, 7,620,500, 7,620,502, 7,629,170, 7,702,464, 7,747,391, 7,747,393, 7,751,986, 7,776,598, 7,783,428, 7,795,030, 7,853,410, 7,868,138, 7,783,428, 7,873,477, 7,873,499, 7,904,249, 7,957,912, 7,981,614, 8,014,961, 8,029,988, 8,048,674, 8,058,001, 8,076,138, 8,108,150, 8,170,806, 8,224,580, 8,377,681, 8,383,346, 8,457,903, 8,504,498, 8,589,085, 8,762,066, 8,768,871, 9,593,326, 9,665,694, 9,684,771, and all related US and non-US counterparts; Ling et al., Anal. Biochem., 1997, 254(2):157-78; Dale et al., Meth. Mol. Biol., 57:369-74 [1996]; Smith, Ann. Rev. Genet., 1985, 19:423-462; Botstein et al., Science, 1985, 229:1193-1201; Carter, Biochem. J., 1986, 237:1-7; Kramer et al., Cell, 1984, 38:879-887; Wells et al., Gene, 1985, 34:315-323; Minshull et al., Curr. Op. Chem. Biol., 1999, 3:284-290; Christians et al., Nat. Biotechnol., 1999, 17:259-264; Crameri et al., Nature, 1998, 391:288-291; Crameri, et al., Nat. Biotechnol., 1997, 15:436-438; Zhang et al., Proc. Nat. Acad. Sci. USA, 1997, 94:4504-4509; Crameri et al., Nat. Biotechnol., 1996, 14:315-319; Stemmer, Nature, 1994, 370:389-391; Stemmer, Proc. Nat. Acad. Sci. USA, 1994, 91:10747-10751; WO 95/22625; WO 97/0078; WO 97/35966; WO 98/27230; WO 00/42651; WO 01/75767; WO 2009/152336; and U.S. Pat. Appln. Publ. Nos. 2011/0082055, 2014/0005057, 2014/0214391, 2014/0221216, 2015/0133307, 2015/0134315, and 2015/0050658; all of which are incorporated herein by reference).

[0352] In some embodiments, the enzyme clones obtained following mutagenesis treatment are screened by subjecting the enzyme preparations to a defined temperature, acid pH conditions, exposure to proteases, or other assay conditions, and measuring the amount of enzyme activity after such treatments. Clones containing the polynucleotide encoding an engineered oxalate decarboxylase polypeptide of interest are then isolated, sequenced to identify the nucleotide sequence changes (if any), and used to express the enzyme in a host cell. Measuring enzyme activity from the expression libraries can be performed using any suitable method known in the art, such as described in the Examples.

[0353] For engineered polypeptides of known sequence, the polynucleotides encoding the enzyme can be prepared by standard solid-phase methods, according to known synthetic methods. In some embodiments, fragments of up to about 100 bases can be individually synthesized, then joined (e.g., by enzymatic or chemical litigation methods, or polymerase mediated methods) to form any desired continuous sequence. For example, polynucleotides and oligonucleotides disclosed herein can be prepared by chemical synthesis using the classical phosphoramidite method (See e.g., Beaucage et al., Tet. Lett., 1981, 22:1859-69; and Matthes et al., EMBO J., 1984, 3:801-05), as it is typically practiced in automated synthetic methods. According to the phosphoramidite method, oligonucleotides are synthesized (e.g., in an automatic DNA synthesizer, purified, annealed, ligated and cloned in appropriate vectors).

[0354] Accordingly, in some embodiments, a method for preparing the engineered oxalate decarboxylase polypeptide can comprise: (a) synthesizing a polynucleotide encoding an engineered oxalate decarboxylase polypeptide comprising an amino acid sequence corresponding to any polypeptide variant as described herein, and (b) expressing the engineered oxalate decarboxylase polypeptide encoded by the polynucleotide. In some embodiments of the method, the polynucleotide encoding the polypeptide can be designed or engineered to encode a polypeptide optionally having one or several (e.g., up to 3, 4, 5, or up to 10) amino acid residue deletions, insertions and/or substitutions. In some embodiments, the amino acid sequence has optionally 1-2, 1-3, 1-4, 1-5, 1-6, 1-7, 1-8, 1-9, 1-10, 1-15, 1-20, 1-21, 1-22, 1-23, 1-24, 1-25, 1-30, 1-35, 1-40, 1-45, or 1-50 amino acid residue deletions, insertions and/or substitutions. In some embodiments, the amino acid sequence has optionally 1, 2, 3, 4, 5, 6, 7, 8, 9, 10, 11, 12, 13, 14, 15, 16, 17, 18, 19, 20, 21, 22, 23, 24, 25, 30, 30, 35, 40, 45, or 50 amino acid residue deletions, insertions and/or substitutions. In some embodiments, the amino acid sequence has optionally 1, 2, 3, 4, 5, 6, 7, 8, 9, 10, 11, 12, 13, 14, 15, 16, 18, 20, 21, 22, 23, 24, or 25 amino acid residue deletions, insertions and/or substitutions. In some embodiments, the substitutions are conservative or non-conservative substitutions.

[0355] As noted above, the expressed engineered ODC polypeptide can be evaluated for any desired improved property or combination of properties (e.g., activity, stability, protease resistance, etc.) using any suitable assay known in the art, including but not limited to the assays and conditions described herein.

### Compositions of Engineered Oxalate Decarboxylase

[0356] In another aspect, the present disclosure provides compositions comprising the engineered oxalate decarboxylase polypeptides described herein for various uses, including but not limited to use as pharmaceuticals, dietary/nutritional supplements, food, feed, and fine chemical production. For example, in some embodiments, the present disclosure provides a composition comprising a food and/or feeds and at least one engineered oxalate decarboxylase polypeptide and/or at least one polynucleotide encoding at least one engineered oxalate decarboxylase polypeptide.

[0357] In some embodiments, the engineered oxalate decarboxylase polypeptide find use in any suitable edible enzyme delivery matrix. In some embodiments, the engineered oxalate decarboxylase polypeptide variants are present or formulated in an edible enzyme delivery matrix designed for rapid dispersal of the engineered oxalate decarboxylase polypeptide within the digestive tract of an animal or subject upon ingestion of the polypeptide.

[0358] In some embodiments, the engineered oxalate decarboxylase polypeptides are prepared as a pharmaceutical or dietary composition. Depending on the mode of administration, the pharmaceutical composition comprises an engineered oxalate decarboxylase polypeptide described herein, and a pharmaceutically acceptable carrier or excipient. In some embodiments, the pharmaceutical composition comprises a therapeutically effective amount of the engineered oxalate decarboxylase polypeptide. In some embodiments, the pharmaceutical or dietary composition is in the form of a solid, semi- solid, or liquid. In some embodiments, the compositions include other pharmaceutically acceptable components such as diluents, buffers, excipients, salts, emulsifiers, preservatives, stabilizers, fillers, and other ingredients. A description of pharmaceutically acceptable excipients and carriers is available in Remington’s Pharmaceutical Sciences (Mack Pub. Co., N.J. 1991) and Remington: The Science and Practice of Pharmacy, A. Adejare ed., 23 Ed., Academic Press 2020).

[0359] In some embodiments, the engineered oxalate decarboxylase polypeptides are formulated for use in oral pharmaceutical compositions. Any suitable form for use in delivering the engineered oxalate decarboxylase polypeptides find use in the present invention, including but not limited to pills, tablets, gel tabs, capsules, lozenges, dragees, powders, soft gels, sol-gels, gels, emulsions, implants, patches, sprays, ointments, liniments, creams, pastes, jellies, paints, aerosols, chewing gums, demulcents, sticks, suspensions (including but not limited to oil-based suspensions, oil-in water emulsions, etc.), slurries, syrups, controlled release formulations, suppositories, etc. In some embodiments, the engineered oxalate decarboxylase polypeptides are provided in a format suitable for injection (i.e., in an injectable formulation).

[0360] In some embodiments, compositions comprising the engineered oxalate decarboxylase polypeptides of the present invention include one or more commonly used carrier compounds, including but not limited to sugars (e.g., lactose, sucrose, mannitol, and/or sorbitol), starches (e.g., corn, wheat, rice, potato, or other plant starch), cellulose (e.g., methyl cellulose, hydroxypropylmethyl cellulose, sodium carboxy- methylcellulose), gums (e.g., arabic, tragacanth, guar, etc.), and/or proteins (e.g., gelatin, collagen, etc.). Additional components in oral formulations may include coloring and or sweetening agents (e.g., glucose, sucrose, and mannitol) and lubricating agents (e.g., magnesium stearate), as well as enteric coatings (e.g., methacrylate polymers, hydroxyl propyl methyl cellulose phthalate, and/or any other suitable enteric coating known in the art). In some embodiments, disintegrating or solubilizing agents are included (e.g., cross-linked polyvinyl pyrrolidone, agar, alginic acid or salts thereof, such as sodium alginate). In some embodiments, the engineered oxalate decarboxylase polypeptide are combined with various additional components, including but not limited to preservatives, suspending agents, thickening agents, wetting agents, alcohols, fatty acids, and/or emulsifiers, particularly in liquid formulations.

[0361] In some embodiments, the engineered oxalate decarboxylase polypeptide are combined with various additional components, including but not limited to preservatives, suspending agents, thickening agents, wetting agents, alcohols, fatty acids, and/or emulsifiers, particularly in liquid formulations.

[0362] In some embodiments, the engineered oxalate decarboxylase polypeptides are provided in biocompatible matrices such as sol- gels, including silica-based (e.g., oxysilane) sol-gels. In some embodiments, the engineered oxalate decarboxylase polypeptides are encapsulated. In some alternative embodiments, the engineered oxalate decarboxylase polypeptides are encapsulated in nanostructures (e.g., nanotubes, nanotubules, nanocapsules, or microcapsules, microspheres, liposomes, etc.).

[0363] It is not intended that the present invention be limited to any particular delivery formulation and/or means of delivery. In some embodiments, the engineered oxalate decarboxylase polypeptides be administered by any suitable means known in the art, including but not limited to parenteral, oral, topical, transdermal, intranasal, intraocular, intrathecal, via implants, etc.

[0364] In some embodiments, the engineered oxalate decarboxylase polypeptides are chemically modified by glycosylation, pegylation (i.e., modified with polyethylene glycol [PEG] or activated PEG, etc.) or other compounds (See e.g., Ikeda, Amino Acids, 2005, 29:283-287; US Pat. Nos. 7,531,341, 7,534,595, 7,560,263, and 7,553,653; U.S. Pat. Appln. Publ. Nos. 2013/0039898, 2012/0177722, etc.).

[0365] In some additional embodiments, the engineered oxalate decarboxylase polypeptides are provided in formulations comprising matrix-stabilized enzyme crystals. In some embodiments, the formulation comprises a cross-linked crystalline engineered oxalate decarboxylase polypeptide and a polymer with a reactive moiety that adheres to the enzyme crystals. The present invention also provides engineered oxalate decarboxylase polypeptides in polymers.

[0366] It is to be understood that for the compositions herein, including the pharmaceutical compositions, any of the engineered oxalate decarboxylase polypeptides described herein, including an engineered oxalate carboxylase set forth in Tables 4-1, 4-2, 4-3, 4-4, 4-5, 4-6, 4-7, 5-1, and 5-2 can be used in the compositions.

[0367] In some additional embodiments, the pharmaceutical composition comprises an oxalate decarboxylase comprising an amino acid sequence comprising SEQ ID NO: 2, 4, 6, 8, 10, 12, 14, 16, 18, 20, 22, 24, or 26, or an amino acid comprising residues 1-424 of SEQ ID NO: 6.

### Uses of the Engineered Oxalate Decarboxylases

[0368] In a further aspect, the engineered decarboxylase polypeptides are used for therapeutic, diagnostic, or industrial purposes.

[0369] In some embodiments, the engineered oxalate decarboxylase polypeptides described herein are used to reduce levels of oxalate in a subject, such as a patient afflicted with abnormally elevated or pathological levels of oxalate, such as in the urine and/or plasma. In some embodiments, a method of reducing levels of oxalate in a subject comprises administering to a subject in need thereof an effective amount of an engineered oxalate decarboxylase polypeptide described herein or a composition comprising the engineered oxalate decarboxylase, to reduce levels of oxalate in the subject. In some embodiments, an effective amount of the engineered oxalate decarboxylase is administered for reducing the levels of oxalate in urine and/or plasma of the subject.

[0370] In some embodiments, the engineered oxalate decarboxylase polypeptides are used to treat and/or prevent symptoms of hyperoxaluria. In some embodiments, a method for treating and/or preventing the symptoms of hyperoxaluria in a subject comprises administering to a subject with hyperoxaluria an effective amount of an engineered oxalate decarboxylase polypeptide described herein or a composition comprising the engineered oxalate decarboxylase. In some embodiments, the subject is a patient afflicted with primary hyperoxaluria. In some embodiments, the subject is a patient afflicted with secondary hyperoxaluria. In some embodiments, the secondary hyperoxaluria is enteric hyperoxaluria. In some embodiments, the subject is afflicted with idiopathic hyperoxaluria.

[0371] In some embodiments, an effective amount of the engineered oxalate decarboxylase is administered is a therapeutically effective amount such that the symptoms of hyperoxaluria are ameliorated. In some embodiments, an effective amount of the engineered oxalate decarboxylase is administered such that the level of oxalate in urine and/or plasma is reduced. In some embodiments, the subject treated with an engineered oxalate carboxylase is able to eat a diet that is higher in its oxalate content compared to diets required by subjects who are afflicted with hyperoxaluria.

[0372] In some embodiments of the methods above, the subject treated with an engineered oxalate decarboxylase polypeptide is an infant, child, young adult, or adult.

[0373] In some embodiments, the dosage of engineered oxalate decarboxylase polypeptide(s) administered to a patient depends upon, among others, the general condition of the patient, age, sex, weight, and the disease/condition being treated, and other factors known to those in the art. In some embodiments, the compositions are intended for single or repeat administration to a patient. Preferably, the compositions are administered repeatedly. In some embodiments, the amount of engineered oxalate decarboxylase polypeptide(s) in the composition(s) administered to a patient is sufficient to effectively treat, ameliorate and/or prevent the symptoms of the disease or condition.

[0374] In some embodiments, the engineered oxalate decarboxylase is administered at about 0.1 to about 3 g/dose. In some embodiments, the engineered oxalate decarboxylase is administered at a dose of about 0.2 to about 2.5 g, about 0.25 to about 2 g, or about 0.5 to about 1.5 g. In some embodiments, the engineered oxalate decarboxylase is administered at a dose of about 0.1, 0.2, 0.5, 1, 1.5, 2. 2.5, or 3 g.

[0375] In some embodiments, the engineered oxalated decarboxylase is administered at about 100 U/kg body weight to about 5000 U/kg body weight. In some embodiments, the engineered oxalated decarboxylase is administered at about 300 U/kg body weight to about 3000 U/kg body weight. In some embodiments, the engineered oxalated decarboxylase is administered at about, 500 U/kg to about 2000 U/kg body weight. A Unit of enzyme is provided in Example 12.

[0376] In some embodiments, the engineered oxalate decarboxylase is administered 1-5 times per day, 1-4 times per day, 1-3 times per day, or 1-2 times per day. In some embodiments, the engineered oxalate decarboxylase is administered 2-5 time per day, 2-4 times per day, or 2-4 times per day. In some embodiments, the engineered oxalate decarboxylase is administered once (1) per day, 2 times per day, 3 times per day, 4 times per day, or 5 times per day.

[0377] In some embodiments, the engineered oxalate decarboxylase is administered prior to, concurrently with, or subsequent to ingestion of food or meal. In some embodiments, the engineered oxalate decarboxylase is administered orally prior to, concurrently with, or subsequent to ingestion of food or meal. In some embodiments, the engineered oxalate decarboxylase is administered together with food or a meal.

[0378] In some embodiments, the engineered oxalate decarboxylase polypeptides are used in diagnostics, e.g., for detecting oxalate (Costello et al, J. Lab. Clin. Med., 1976, 87(5):903-908); Parkinson et al., Clin Chim Acta., 1985, 152(3):335-45). In some embodiments, a method of determining amount of oxalate in a sample comprises contacting a sample with an engineered oxalate decarboxylase described herein and determining amount of formate product. In some embodiments, the amount of formate can be determined by use of formate dehydrogenase or formyl-CoA transferase (U.S. Pat. No. 5,604,111).

[0379] In some embodiments, the engineered oxalate decarboxylase is used for industrial purposes in reducing levels of oxalate, such as in reducing formation of calcium oxalate deposits/precipitates. Deposits or precipitates of calcium oxalate are problematic in pulp and paper industries, including removal of oxalate from industrial wastewater. In some embodiments, the engineered oxalate decarboxylase is added to industrial plant filtrates containing oxalate, e.g., to prevent or reduce scaling.

[0380] The foregoing and other aspects of the invention may be better understood in connection with the following non-limiting examples. These Examples, including experiments and results achieved, are provided for illustrative purposes only and are not to be construed as limiting the present invention.

### EXAMPLES

[0381] In the experimental disclosure below, the following abbreviations apply where appropriate: ppm (parts per million); M (molar); mM (millimolar), uM and µM (micromolar); nM (nanomolar); mol (moles); gm and g (gram); mg (milligrams); ug and µg (micrograms); L and l (liter); ml and mL (milliliter); cm (centimeters); mm (millimeters); um and µm (micrometers); sec. (seconds); min(s) (minute(s)); h(s) and hr(s) (hour(s)); U (units); MW (molecular weight); rpm (rotations per minute); psi and PSI (pounds per square inch); °C (degrees Centigrade); RT and rt (room temperature); CDS (coding sequence); DNA (deoxyribonucleic acid); RNA (ribonucleic acid); AUC (area under the curve); E. coli W3110 (commonly used laboratory E. coli strain, available from the Coli Genetic Stock Center [CGSC], New Haven, CT); HTP (high throughput); HPLC (high pressure liquid chromatography); LC (liquid chromatography); MS (mass spectroscopy); LC-MS/MS (liquid chromatography with two mass spectrometers); SPE (solid phase extraction); IPTG (isopropyl β-D-1-thiogalactopyranoside); PLP (pyridoxal 5′-phosphate); BSA (bovine serum albumin); BW (body weight); FIOPC (fold improvements over positive control); FIOP (fold improvement over parent); LB (Luria broth); TB (Terrific broth).

### Example 1

### Oxalate Decarboxylase Gene Acquisition and Construction of Expression Vectors

[0382] Bacterial ODCs from different organisms in Table 1-1 were codon optimized for expression in E. coli, synthesized and cloned into the E. coli expression vector pCK110900 vector system (See e.g., U.S. Pat. Appln. Publn. 2006/0195947, which is hereby incorporated by reference herein). The plasmid construct was transformed into an E. coli strain derived from W3110. The E. coli strains containing the ODC genes were grown in 96-well format and assayed for ODC activity (40 mM oxalate, pH 4.0) as described below in Example 3. The activity obtained from these ODCs are shown in Table 1-1.

TABLE 1-1

Unchallenged activity at pH 4.0 for wild type oxalate decarboxylases

| SEQ ID NO: (nt/aa) | Source Organism | Activity at pH 4.0 Relative to SEQ ID NO: 2 |
|---|---|---|
| ½ | Gemmata sp. SH-PL17 | ++++ |
| ⅚ | Flammulina velutipes | +++ |
| ⅞ | Bacillus subtilis | + |
| 9/10 | Bacillus vallismortis | ++++ |
| 11/12 | Bacillus glycinifermentans | + |
| 13/14 | Bacillus atrophaeus | + |
| 15/16 | Bacillus megaterium | ++ |
| 17/18 | Agrobacterium tumefaciens str. C58 | ++++ |
| 19/20 | Rhizobiales bacterium | ++++ |
| 21/22 | Hyphomicrobium sp. 802 | +++ |
| 23/24 | Shinella sp. | + |
| 25/26 | Legionella maceachernii | ++ |

All activities are expressed as a change in absorbance at 340 nm (ΔA340). Levels of activity are defined as follows: “+” 0.15 to 0.50, “++” > 0.50, “+++” > 1.0,“++++”>1.5.

### Example 2

### Engineered ODC Variants Expression and Construction

[0383] Based on the results obtained from Table 1-1, the ODC from SEQ ID: 2 was subcloned with and without a C-terminal 6xHis-tag into the pJV110900 vector system (See e.g., U.S. Pat. Appln Publ. 2017/213758) to generate SEQ ID: 4 and 2 respectively. The plasmid construct was transformed into an E. coli strain derived from W3110. Directed evolution techniques generally known by those skilled in the art were used to generate libraries of gene variants from this plasmid construct (See e.g., US Pat. No. 8,383,346, WO2010/144103, and references cited herein) as well as its derivatives.

### Example 3

### High-Throughput (HTP) Growth of ODC Variants and Screening Conditions

### High-Throughput (HTP) Growth of Escherichia Coli ODC and Variants

[0384] Transformed E. coli cells were selected by plating onto LB agar plates containing 1% glucose with selection. After overnight incubation at 37° C., colonies were placed into the wells of 96-well shallow flat bottom plates (NUNC™, Thermo-Scientific) filled with 180 µl/well LB supplemented with 1% glucose and selection. The cultures were allowed to grow overnight for 18-20 hours in a shaker (200 rpm, 30° C., and 85% relative humidity; Kuhner).

[0385] Overnight growth samples (20 µL) were transferred into Costar 96-well deep plates filled with 380 µL of Terrific Broth supplemented with a selection compound. The plates were incubated for approximately 2 hours in a shaker (250 rpm, 30° C., and 85% relative humidity; Kuhner). The cells were then induced with 40 µL of 10 mM IPTG and 10 mM manganese chloride in sterile water and incubated overnight for 20-24 hours in a shaker (250 rpm, 30° C., and 85% relative humidity; Kuhner). The cells were pelleted (4000 rpm × 20 min), the supernatants were discarded, and the cells were frozen at -80° C. prior to analysis.

### Lysis of HTP Pellets

[0386] First, 400 µL of lysis buffer (1X PBS, 1 mg/ml lysozyme, and 0.5 mg/ml polymyxin B sulfate) were added to the cell pellets. The mixture was agitated for 1.5-2 hours at room temperature, and centrifuged (4000 rpm × 15 min) prior to use of the clarified lysates in the various HTP assays described herein. Analysis of these lysates by SDS-PAGE revealed the presence of an overexpressed protein bands at an apparent MW of 40-50 kDa, consistent with the expected MW of ODC. Sometimes additional dilutions of clarified lysate were performed with PBS buffer prior to challenges and analysis.

### Analysis of Clarified Lysates for ODC Activity

[0387] ODC activity was assessed using potassium oxalate as a substrate and quantifying formate produced using formate dehydrogenase (FDH). Oxalate assay solution was prepared by dissolving 4.44-44.4 mM potassium oxalate in McIlvaine buffer pH 2.0-4.0 or pH 5.5-6.5. Lysate was diluted 4-200x in 1X PBS pH 7.0-7.4. For dilutions >10x, sequential dilutions were performed, wherein the first dilution was in 1X PBS, pH 7.0-7.4 and the secondary dilutions were in water. To set up ODC activity reactions, 10 µL diluted ODC was added to 90 µL oxalate solution in a round bottom plate (Costar), except in Table 1-1, where 10uL lysate was added to 40 µL 50 mM oxalate solution. Reactions were incubated at 37° C. for 1 hour and quenched by mixing 1:1 with 1 M potassium phosphate dibasic. Formate detection assay solution was prepared by dissolving 25 mM nicotinamide adenine dinucleotide (NAD) in 125 mM potassium phosphate pH 7.5. To set up formate detection reactions, 10-25 µL quenched oxalate assay sample was added to 20 µL formate detection solution with 0-15 µL water added to bring to 45 µL total, before 5 µL 10 g/L formate dehydrogenase (FDH; Codexis) was added in a UV-Star® half area, flat bottom plate (Greiner). Reactions were incubated at 25° C. for 10 min, shaking 200 rpm, and absorbance at 340 nm was read on a Molecular Devices Spectramax plate reader. Background subtracted absorbance (Table 1-1) or absorbance relative to that of the round backbone (fold improvement over parent (FIOP)) were used for activity values.

### HTP Analysis of Clarified Lysates Pretreated With Low pH and Pepsin

[0388] The activities of variants were determined after pre-incubation at low pH in the presence of pepsin to simulate the environment of the stomach. First, clarified lysate was diluted 0x -8x in PBS buffer, then mixed 1:1 with McIlvaine buffer pH 2.2-3.2 with 0.2-1.6 mg/mL pepsin from porcine gastric mucosa (Sigma) in a round bottom plate (Costar), for a final challenge pH of 2.2-3.0 and a final pepsin concentration of 0.1-0.8 mg/mL. Samples were mixed then incubated for 1-2 hours at 37° C. Samples were then analyzed for residual ODC activity as described in Examples 3.3, except that samples were taken directly into oxalate assay solution (pH 2.4-3.0) without diluting in PBS.

### Example 4

### Screening Results of ODC Variants Based on SEQ ID NO: 4

[0389] Library variants were generated from homologs diversity and mutagenesis at surface positions based on a structural model of SEQ ID NO: 4. These variants were screened in triplicates for ODC activity at pH 3.0 with 10 mM potassium oxalate after a 1 hour simulated gastric challenge (0.2 mg/mL pepsin, pH 3.0) and unchallenged ODC activity at pH 3.0 with 4 mM and 10 mM potassium oxalate as described in Example 3. Analysis of the data relative to SEQ ID NO: 4 are listed in Table 4-1.

TABLE 4-1

Oxalate decarboxylase activity Relative to SEQ ID NO: 4

| SEQ ID NO: (nt/aa) | Amino Acid Differences (Relative to SEQ ID NO: 2 or 4) | FIOP Unchallenged Activity at pH 3.0, 10 mM oxalate Relative to SEQ ID NO: 4 | FIOP Unchallenged Activity at pH 3.0, 4 mM oxalate Relative to SEQ ID NO: 4 | FIOP Pepsin Challenge Relative to SEQ ID NO: 4 |
|---|---|---|---|---|
| ¾ | | + | + | + |
| 27/28 | E346G | | + | + |
| 29/30 | E346L | | + | ++ |
| 31/32 | K124G | + | + | + |
| 33/34 | K124T | + | + | + |
| 35/36 | K359L | + | + | ++ |
| 37/38 | D174K | + | + | ++ |
| 39/40 | K173V | + | + | ++ |
| 41/42 | D123Q | | + | + |
| 43/44 | K196F | + | + | + |
| 45/46 | R304D | | | + |
| 47/48 | V301Q | | | + |
| 49/50 | K347F | | | + |
| 51/52 | K359W | + | + | + |
| 53/54 | K124Q | + | + | ++ |
| 55/56 | K124A | + | + | ++ |
| 57/58 | P11R | | | + |
| 59/60 | K284R | + | + | + |
| 61/62 | P210L | + | + | + |
| 63/64 | D169L | + | ++ | + |
| 65/66 | R304G | + | + | + |
| 67/68 | K216W | | | + |
| 69/70 | K347R | + | + | + |
| 71/72 | K196V | + | ++ | ++ |
| 73/74 | K284A | + | + | + |
| 75/76 | R195L | + | + | ++ |
| 77/78 | S339G | + | + | ++ |
| 79/80 | P4S | | + | + |
| 81/82 | K196R | + | + | + |
| 83/84 | F6A | | | + |
| 85/86 | K124C | + | + | + |
| 87/88 | R195Y | + | + | + |
| 89/90 | R180E | + | + | + |
| 91/92 | F80L | + | + | + |
| 93/94 | P243V | | + | + |
| 95/96 | A182R | + | + | + |
| 97/98 | P210E | ++ | + | ++ |
| 99/100 | M7G | | | + |
| 101/102 | T226S | + | ++ | + |
| 103/104 | D174A | + | + | + |
| 105/106 | K196M | | + | + |
| 107/108 | P4C | ++ | ++ | ++ |
| 109/110 | L156E | | + | + |
| 111/112 | V183E | + | + | + |
| 113/114 | R227S | + | + | + |
| 115/116 | R219V | | + | + |
| 117/118 | E62G | | | + |
| 119/120 | D174G | + | + | + |
| 121/122 | D169G | + | + | + |
| 123/124 | K124R | + | + | + |
| 125/126 | P210V | + | ++ | ++ |
| 127/128 | S343R | + | + | + |
| 129/130 | K216S | + | ++ | ++ |
| 131/132 | P210R | + | + | + |
| 133/134 | F6W | | + | + |
| 135/136 | P4R | | | + |
| 137/138 | F6S | | | + |
| 139/140 | A16S/A26E | | + | ++ |
| 141/142 | A16S/A26E/E242D | | + | + |
| 143/144 | A16S/A26E/V183I/K232T | | + | ++ |
| 145/146 | A155P/L206M/E242D | | + | ++ |
| 147/148 | A16S/A26E/S339G | + | + | ++ |
| 149/150 | A16S/A26E/A155P/L206M/S339G | | + | ++ |
| 151/152 | A26E | + | + | ++ |
| 153/154 | A26E/L206M/S339G | + | + | ++ |
| 155/156 | E31K/L82I/P210A | + | + | +++ |
| 157/158 | E31K/L82I | + | + | ++ |
| 159/160 | E31K/A356S | + | + | ++ |
| 161/162 | E31K/A97T/T226S | | + | ++ |
| 163/164 | E31K/D240E/M270L | + | + | +++ |
| 165/166 | E31K/L82I/T226S | + | ++ | +++ |
| 167/168 | E31K/D240E | + | + | ++ |
| 169/170 | E31K | + | + | ++ |
| 171/172 | E31K/P210A/E318Q | + | ++ | +++ |
| 173/174 | E31K/P210A | + | + | +++ |

All activities were determined relative to the reference polypeptide of SEQ ID NO: 4. Levels of increased activity are defined as follows: “+” 0.9 to 1.1, “++” > 1.1, “+++” > 2

### Example 5

### Screening Results of ODC Variants Based on SEQ ID NO: 172

[0390] Based on the results from Table 4-1, SEQ ID NO: 172 was chosen as the backbone. Beneficial mutations identified from Table 4-1 were recombined into the backbone. The variants were assayed in triplicate for ODC activity at pH 2.6 with 4 mM potassium oxalate after a 1 hour simulated gastric challenge (0.1 mg/mL pepsin, pH 2.8) and unchallenged ODC activity at pH 2.6 with 4 mM potassium oxalate as described in Example 3. Analysis of the data relative to SEQ ID NO: 172 are listed in Table 4-2.

TABLE 4-2

Oxalate decarboxylase activity Relative to SEQ ID NO: 172

| SEQ ID NO: (nt/aa) | Amino Acid Differences (Relative to SEQ ID NO: 172) | Amino Acid Differences (Relative to SEQ ID NO: 4) | FIOP Unchallenged Activity at pH 2.6 Relative to SEQ ID NO: 172 | FIOP Pepsin Challenge Relative to SEQ ID NO: 172 |
|---|---|---|---|---|
| 175/176 | H13P | H13P/E31K/P210A/E318Q | +++ | +++ |
| 177/178 | H212S | E31K/P210A/H212S/E318Q | +++ | +++ |
| 179/180 | K124A/K196V/A210E/ T226S | E31K/K124A/K196V/P210E/T226S/E318Q | +++ | +++ |
| 181/182 | T5S | T5S/E31K/P210A/E318Q | +++ | ++ |
| 183/184 | H13E | H13E/E31K/P210A/E318Q | +++ | ++ |
| 185/186 | A16S/A26E/K124A/A155P/R195L/A210E/K284A | A16S/A26E/E31K/K124A/A155P/R195L/P210E/K284A/E318Q | +++ | +++ |
| 187/188 | K196V/T226S | E31K/K196V/P210A/T226S/E318Q | +++ | + |
| 189/190 | A16S/A155P/R195L/A210E/T226S | A16S/E31K/A155P/R195L/P210E/T226S/E318Q | +++ | +++ |
| 191/192 | A16S/R195L/A210E/T226S | A16S/E31K/R195L/P210E/T226S/E318Q | +++ | +++ |
| 193/194 | A16S/A155P/D174K/K196V | A16S/E31K/A155P/D174K/K196V/P210A/E318Q | +++ | +++ |
| 195/196 | A16S/R195L/T226S | A16S/E31K/R195L/P210A/ T226S/E318Q | +++ | +++ |
| 197/198 | H13L | H13L/E31K/P210A/E318Q | +++ | ++ |
| 199/200 | Q318E | E31K/P210A | ++ | +++ |
| 201/202 | A16S/R195L/K196V/A210E | A16S/E31K/R195L/K196V/ P210E/E318Q | ++ | +++ |
| 203/204 | A16S/A26E/K124A/A155P/D174K/K196V/A210E | A16S/A26E/E31K/K124A/A155P/D174K/K196V/P210E/E318Q | ++ | +++ |
| 205/206 | R195L/A210E | E31K/R195L/P210E/E318Q | ++ | +++ |
| 207/208 | A26E/A155P/D174K/A210E | A26E/E31K/A155P/D174K/P210E/E318Q | ++ | +++ |
| 209/210 | N316V | E31K/P210A/N316V/E318Q | ++ | +++ |
| 211/212 | T60V | E31K/T60V/P210A/E318Q | ++ | +++ |
| 213/214 | A16S/A155P/D174K | A16S/E31K/A155P/D174K/P210A/E318Q | ++ | +++ |
| 215/216 | A16S/K124A/D174K/K196V | A16S/E31K/K124A/D174K/ K196V/P210A/E318Q | ++ | +++ |
| 217/218 | A16S/T226S | A16S/E31K/P210A/T226S/E318Q | ++ | ++ |
| 219/220 | A16S/A26E/D174K/K196V/T226S | A16S/A26E/E31K/D174K/K196V/P210A/T226S/E318Q | ++ | +++ |
| 221/222 | D17H | D17H/E31K/P210A/E318Q | ++ | +++ |
| 223/224 | A331V | E31K/P210A/E318Q/A331V | ++ | +++ |
| 225/226 | K124A/R195L | E31K/K124A/R195L/P210A/E318Q | ++ | +++ |
| 227/228 | A16S/D174K/K196V | A16S/E31K/D174K/K196V/P210A/E318Q | ++ | +++ |
| 229/230 | D17A | D17A/E31K/P210A/E318Q | ++ | +++ |
| 231/232 | P188A | E31K/P188A/P210A/E318Q | ++ | ++ |
| 233/234 | R195L/K196V/A210E | E31K/R195L/K196V/P210E/E318Q | ++ | +++ |
| 235/236 | D174K/K196V/A210E | E31K/D174K/K196V/P210E/E318Q | ++ | +++ |
| 237/238 | T5C | T5C/E31K/P210A/E318Q | ++ | ++ |
| 239/240 | A16S/A26E/A155P/D174K | A16S/A26E/E31K/A155P/D174K/P210A/E318Q | ++ | +++ |
| 241/242 | A16S/A155P/R195L/K196V/T226S | A16S/E31K/A155P/R195L/K196V/P210A/T226S/E318Q | ++ | +++ |
| 243/244 | R195L/T226S/K284A | E31K/R195L/P210A/T226S/K284A/E318Q | ++ | +++ |
| 245/246 | D17N | D17N/E31K/P210A/E318Q | ++ | ++ |
| 247/248 | A16L | A16L/E31K/P210A/E318Q | ++ | +++ |
| 249/250 | D240E | E31K/P210A/D240E/E318Q | ++ | ++ |
| 251/252 | A16S/A26E/K124A/A155P/R195L/K196V/T226S | A16S/A26E/E31K/K124A/A155P/R195L/K196V/P210A/T226S/E318Q | ++ | ++ |
| 253/254 | A331P | E31K/P210A/E318Q/A331P | ++ | ++ |
| 255/256 | V183I/K232T/S339G/S343R | E31K/V183I/P210A/K232T/ E318Q/S339G/S343R | ++ | + |
| 257/258 | V183I/L206M | E31K/V183I/L206M/P210A/E318Q | ++ | ++ |
| 259/260 | P63A | E31K/P63A/P210A/E318Q | ++ | ++ |
| 261/262 | K173V/K347R | E31K/K173V/P210A/E318Q/K347R | ++ | + |
| 263/264 | A16S/A26E/D174K/K196V | A16S/A26E/E31K/D174K/K196V/P210A/E318Q | ++ | ++ |
| 265/266 | A16S/K284A | A16S/E31K/P210A/K284A/E318Q | ++ | +++ |
| 267/268 | T60R | E31K/T60R/P210A/E318Q | ++ | ++++ |
| 269/270 | V46R | E31K/V46R/P210A/E318Q | ++ | +++ |
| 271/272 | A16S/K124A/R195L/K196V | A16S/E31K/K124A/R195L/ K196V/P210A/E318Q | ++ | +++ |
| 273/274 | H274S | E31K/P210A/H274S/E318Q | ++ | +++ |
| 275/276 | A331I | E31K/P210A/E318Q/A331I | ++ | +++ |
| 277/278 | D174K/K196V | E31K/D174K/K196V/P210A/E318Q | ++ | +++ |
| 279/280 | A155P/D174K/K196V | E31K/A155P/D174K/K196V/P210A/E318Q | ++ | +++ |
| 281/282 | D174K/K196V/T226S | E31K/D174K/K196V/P210A/T226S/E318Q | ++ | +++ |
| 283/284 | A331L | E31K/P210A/E318Q/A331L | ++ | +++ |
| 285/286 | A16S/K124A/A155P/D174K/R195L | A16S/E31K/K124A/A155P/D174K/R195L/P210A/E318Q | ++ | +++ |
| 287/288 | A16S/A26E/A155P/D174K/K196V | A16S/A26E/E31K/A155P/D174K/K196V/P210A/E318Q | ++ | +++ |
| 289/290 | A26E/D174K/K196V/A210E/K284A | A26E/E31K/D174K/K196V/P210E/K284A/E318Q | ++ | +++ |
| 291/292 | H212A | E31K/P210A/H212A/E318Q | ++ | +++ |
| 293/294 | A16S/R195L/K196V/K284A | A16S/E31K/R195L/K196V/P210A/K284A/E318Q | ++ | +++ |
| 295/296 | D174K | E31K/D174K/P210A/E318Q | ++ | +++ |
| 297/298 | A16S/K124A/D174K/R195L/A210E/T226S/K284A | A16S/E31K/K124A/D174K/ R195L/P210E/T226S/K284A/E318Q | ++ | +++ |
| 299/300 | A16S/D174K/R195L/K284A | A16S/E31K/D174K/R195L/ P210A/K284A/E318Q | ++ | +++ |
| 301/302 | A26E/D174K/K196V/A210E/T226S/K284A | A26E/E31K/D174K/K196V/P210E/T226S/K284A/E318Q | ++ | +++ |
| 303/304 | H212L | E31K/P210A/H212L/E318Q | ++ | +++ |
| 305/306 | D174K/K196V/T226S/ K284A | E31K/D174K/K196V/P210A/T226S/K284A/E318Q | ++ | +++ |
| 307/308 | K124A/D174K/K196V | E31K/K124A/D174K/K196V/P210A/E318Q | ++ | +++ |
| 309/310 | A26E/D174K/R195L/A210E/T226S | A26E/E31K/D174K/R195L/P210E/T226S/E318Q | ++ | +++ |
| 311/312 | G162A | E31K/G162A/P210A/E318Q | ++ | + |
| 313/314 | A16S/K124A/R195L/K196V/K284A | A16S/E31K/K124A/R195L/K196V/P210A/K284A/E318Q | ++ | +++ |
| 315/316 | L206M/S343R | E31K/L206M/P210A/E318Q/S343R | ++ | + |
| 317/318 | A16S/R195L/K196V | A16S/E31K/R195L/K196V/P210A/E318Q | ++ | +++ |
| 319/320 | A16S/A26E/D174K/R195L/K196V/A210E/T226S | A16S/A26E/E31K/D174K/R195L/K196V/P210E/T226S/E318Q | ++ | +++ |
| 321/322 | A155P/R195L/K196V/T226S | E31K/A155P/R195L/K196V/P210A/T226S/E318Q | + | ++ |
| 323/324 | K18Q | K18Q/E31K/P210A/E318Q | + | ++ |
| 325/326 | A335R | E31K/P210A/E318Q/A335R | + | + |
| 327/328 | K124A/A155P/D174K/R195L/T226S | E31K/K124A/A155P/D174K/R195L/P210A/T226S/E318Q | + | +++ |
| 329/330 | D17C | D17C/E31K/P210A/E318Q | + | ++ |
| 331/332 | A26E/A155P/D174K/R195L/T226S | A26E/E31K/A155P/D174K/R195L/P210A/T226S/E318Q | + | +++ |
| 333/334 | R195L/K196V | E31K/R195L/K196V/P210 A/E318Q | + | ++ |
| 335/336 | G162T | E31K/G162T/P21OA/E318Q | + | ++ |
| 337/338 | P153H | E31K/P153H/P210A/E318Q | + | ++ |
| 339/340 | N316K | E31K/P210A/N316K/E318Q | + | ++ |
| 341/342 | A155P/D174K/R195L | E31K/A155P/D174K/R195L/P210A/E318Q | + | +++ |
| 343/344 | P153Q | E31K/P153Q/P210A/E318Q | + | ++ |
| 345/346 | D174K/R195L/A210E/ K284A | E31K/D174K/R195L/P210E/K284A/E318Q | + | +++ |
| 347/348 | D174K/R195L | E31K/D174K/R195L/P210A/E318Q | + | +++ |
| 349/350 | P153S | E31K/P153S/P210A/E318Q | + | ++ |
| 351/352 | H212F | E31K/P210A/H212F/E318Q | + | ++ |
| 353/354 | K37C | E31K/K37C/P210A/E318Q | + | + |
| 355/356 | H212V | E31K/P210A/H212V/E318Q | + | +++ |
| 357/358 | K124A/D174K/R195L/ T226S/K284A | E31K/K124A/D174K/R195L/P210A/T226S/K284A/E318Q | + | +++ |
| 359/360 | V176L | E31K/V176L/P210A/E318Q | + | + |
| 361/362 | A16S/A155P/D174K/R195L/K196V/T226S/K284A | A16S/E31K/A155P/D174K/R195L/K196V/P210A/T226S/K284A/E318Q | + | +++ |
| 363/364 | V10Q | V10Q/E31K/P210A/E318Q | + | ++ |
| 365/366 | D169G/K173V | E31K/D169G/K173V/P210A/E318Q | + | + |
| 367/368 | A155L | E31K/A155L/P210A/E318Q | + | + |
| 369/370 | K18G | K18G/E31K/P210A/E318Q | + | +++ |
| 371/372 | T60L | E31K/T60L/P210A/E318Q | + | ++ |
| 373/374 | V10A | V10A/E31K/P210A/E318Q | + | ++ |
| 375/376 | K18R | K18R/E31K/P210A/E318Q | + | ++ |
| 377/378 | K33R | E31K/K33R/P210A/E318Q | + | ++ |
| 379/380 | H212G | E31K/P210A/H212G/E318Q | + | + |
| 381/382 | V10R | V10R/E31K/P210A/E318Q | + | ++ |
| 383/384 | H13R | H13R/E31K/P210A/E318Q | + | + |
| 385/386 | K173V/V183I/S343R/K347R | E31K/K173V/V183I/P210A/E318Q/S343R/K347R | + | + |
| 387/388 | A16R | A16R/E31K/P210A/E318Q | + | + |
| 389/390 | P104Q/N265C | E31K/P104Q/P210A/N265C /E318Q | + | + |
| 391/392 | T233R | E31K/P210A/T233R/E318Q | + | ++ |
| 393/394 | T233D | E31K/P210A/T233D/E318Q | + | ++ |

All activities were determined relative to the reference polypeptide of SEQ ID NO: 172. Levels of increased activity are defined as follows: “+” 0.5 to 0.9, “++” > 0.9, “+++” > 1.1,“+++”> 2.

### Example 6

### Screening Results of ODC Variants Based on SEQ ID NO: 320

[0391] Based on the results from Table 4-2, SEQ ID NO: 320 was chosen as the backbone. Beneficial mutations identified from Table 4-2 and homologs diversity were recombined into the backbone. Additionally, to generate new diversity, variants with mutations at active site positions were also constructed on SEQ ID NO: 320. The variants were assayed in triplicate for ODC activity at pH 2.6 with 4 mM potassium oxalate after a 1 hour simulated gastric challenge (0.1 mg/mL pepsin, pH 2.8) and unchallenged ODC activity at pH 2.4 and 6.5 with 4 mM potassium oxalate as described in Example 3. Analysis of the data relative to SEQ ID NO: 320 are listed in Table 4-3.

TABLE 4-3

Oxalate decarboxylase activity Relative to SEQ ID NO: 320

| SEQ ID NO: (nt/aa) | Amino Acid Differences (Relative to SEQ ID NO: 320) | Amino Acid Differences (Relative to SEQ ID NO: 2 or 4) | FIOP Unchallenged Activity at pH 2.4 Relative to SEQ ID NO: 320 | FIOP Unchallenged Activity at pH 6.5 Relative to SEQ ID NO: 320 | FIOP Pepsin Challenge Relative to SEQ ID NO: 320 |
|---|---|---|---|---|---|
| 395/396 | H13P/D17H/V196K | H13P/A16S/D17H/A26E/E31K/D174K/R195L/P210E/T226S/E318Q | + | | ++ |
| 397/398 | D17H/H212S/A331V | A16S/D17H/A26E/E31K/D174K/R195L/K196V/P210E/H212S/T226S/E318Q/A331V | +++ | | +++ |
| 399/400 | D17H/E26A/V196K/H212S/S226T | A16S/D17H/E31K/D174K/R195L/P210E/H212S/E318Q | ++ | | +++ |
| 401/402 | D17H/E26A/V196K/H212A/S226T/A331V | A16S/D17H/E31K/D174K/R195L/P210E/H212A/E318Q/A331V | + | | +++ |
| 403/404 | H13P/D17H/E26A/V196K/A331V | H13P/A16S/D17H/E31K/D174K/R195L/P210E/T226S/E318Q/A331V | ++ | | ++ |
| 405/406 | D17H/T60R/V196K/S226T | A16S/D17H/A26E/E31K/T60R/D174K/R195L/P210E/E318Q | ++ | + | +++ |
| 407/408 | D17H/V46R/H212S | A16S/D17H/A26E/E31K/V46R/D174K/R19SL/K196V/P210E/H212S/T226S/E318Q | +++ | | + |
| 409/410 | E26A/T60V/V196K/S226T/A331V | A16S/E31K/T60V/D174K/R195L/P210E/E318Q/A331V | + | + | +++ |
| 411/412 | D17H/V46R/V196K/H212A/H274Q/A331V | A16S/D17H/A26E/E31K/V46R/D174K/R195L/P210E/H212A/T226S/H274Q/E318Q/A331V | + | | +++ |
| 413/414 | H212S | A16S/A26E/E31K/D174K/R195L/K196V/P210E/H212S/T226S/E318Q | ++ | | ++ |
| 415/416 | D17H/V196K/S226T | A16S/D17H/A26E/E31K/D174K/R195L/P210E/E318Q | ++ | + | +++ |
| 417/418 | H13P/D17H/E26A/H212A/A331V | H13P/A16S/D17H/E31K/D174K/R195L/K196V/P210E/H212A/T226S/E318Q/A331V | + | | +++ |
| 419/420 | H13P/D17H/H212S/S226T/A331V | H13P/A16S/D17H/A26E/E31K/D174K/R19SL/K196V/P210E/H212S/E318Q/A331V | ++ | | ++ |
| 421/422 | V196K/H212S/A331V | 16S/A26E/E31K/D174K/R195L/P210E/H212S/T226S/E318Q/A331V | ++ | + | +++ |
| 423/424 | H13P/D17H/V196K/A331V | H13P/A16S/D17H/A26E/E31K/D174K/R195L/P210E/T226S/E318Q/A331V | ++ | | +++ |
| 425/426 | H13P/D17H/E26A/H212A/S226T/A331V | H13P/A16S/D17H/E31K/D174K/R195L/K196V/P210E/H212A/E318Q/A331V | + | | ++ |
| 427/428 | D17H/T60R/V196K/H212A/S226T/A331V | A16S/D17H/A26E/E31K/T60R/D174K/R195L/P210E/H212A/E318Q/A331V | + | | +++ |
| 429/430 | H13P/D17H/H212S | H13P/A16S/D17H/A26E/E31K/D174K/R19SL/K196V/P210E/H212S/T226S/E318Q | ++ | | ++ |
| 431/432 | H13P/D17H/E26A/A331V | H13P/A16S/D17H/E31K/D174K/R195L/K196V/P210E/T226S/E318Q/A331V | ++ | | ++ |
| 433/434 | H13P/D17H | H13P/A16S/D17H/A26E/E31K/D174K/R19SL/K196V/P210E/T226S/E318Q | ++ | | ++ |
| 435/436 | H13P/D17H/E26A/V196K | H13P/A16S/D17H/E31K/D174K/R195L/P210E/T226S/E318Q | + | | ++ |
| 437/438 | V46R/V196K/H212S/S226T | A16S/A26E/E31K/V46R/D174K/R195L/P210E/H212S/E318Q | + | | ++ |
| 439/440 | D17H/T60R/V196K | A16S/D17H/A26E/E31K/T60R/D174K/R195L/P210E/T226S/E318Q | ++ | + | +++ |
| 441/442 | D17H/V196K/A331V | A16S/D17H/A26E/E31K/D174K/R195L/P210E/T226S/E318Q/A331V | ++ | + | +++ |
| 443/444 | H13P/D17H/V46R/S226T/A331V | H13P/A16S/D17H/A26E/E31K/V46R/D174K/R195L/K196V/P210E/E318Q/A331V | ++ | | ++ |
| 445/446 | D17H/V196K/S226T/A331V | A16S/D17H/A26E/E31K/D174K/R195L/P210E/E318Q/A331V | + | + | +++ |
| 447/448 | D17H/T60V/V196K/S226T | A16S/D17H/A26E/E31K/T60V/D174K/R195L/P210E/E318Q | ++ | | +++ |
| 449/450 | D17H/V46R/V196K/H212S/A331V | A16S/D17H/A26E/E31K/V46R/D174K/R195L/P210E/H212S/T226S/E318Q/A331V | ++ | | ++ |
| 451/452 | H13P/D17H/H212A | H13P/A16S/D17H/A26E/E31K/D174K/R19SL/K196V/P210E/H212A/T226S/E318Q | + | | ++ |
| 453/454 | D17H/V46R/H212S/A331V | A16S/D17H/A26E/E31K/V46R/D174K/R19SL/K196V/P210E/H212S/T226S/E318Q/A331V | ++ | | + |
| 455/456 | D17H/V196K | A16S/D17H/A26E/E31K/D174K/R195L/P210E/T226S/E318Q | ++ | + | +++ |
| 457/458 | H13P/D17H/H212S/S226T | H13P/A16S/D17H/A26E/E31K/D174K/R19SL/K196V/P210E/H212S/E318Q | ++ | | ++ |
| 459/460 | D17H/H212S | A16S/D17H/A26E/E31K/D174K/R195L/K196V/P210E/H212S/T226S/E318Q | +++ | | +++ |
| 461/462 | D17H/E26A/H212S | A16S/D17H/E31K/D174K/R195L/K196V/P210E/H212S/T226S/E318Q | +++ | | +++ |
| 463/464 | H13P/D17H/S226T/A331V | H13P/A16S/D17H/A26E/E31K/D174K/R19SL/K196V/P210E/E318Q/A331V | ++ | | +++ |
| 465/466 | D17H/V196K/H212S/A331V | A16S/D17H/A26E/E31K/D174K/R195L/P210E/H212S/T226S/E318Q/A331V | ++ | | +++ |
| 467/468 | D17H/V196K/H212S/S226T/A331V | A16S/D17H/A26E/E31K/D174K/R195L/P210E/H212S/E318Q/A331V | ++ | | +++ |
| 469/470 | H13P/D17H/E26A/S226T/A331V | H13P/A16S/D17H/E31K/D174K/R195L/K196V/P210E/E318Q/A331V | ++ | | ++ |
| 471/472 | V46R/T60V/V196K/S226T/A331V | A16S/A26E/E31K/V46R/T60V/D174K/R195L/P210E/E318Q/A331V | ++ | + | +++ |
| 473/474 | D17H/V46R/V196K/A331V | A16S/D17H/A26E/E31K/V46R/D174K/R195L/P210E/T226S/E318Q/A331V | ++ | ++ | ++ |
| 475/476 | D17H/H212A/A331V | A16S/D17H/A26E/E31K/D174K/R195L/K196V/P210E/H212A/T226S/E318Q/A331V | | | ++ |
| 477/478 | H13P/D17H/V46R/V196K | H13P/A16S/D17H/A26E/E31K/V46R/D174K/R195L/P210E/T226S/E318Q | + | | ++ |
| 479/480 | V196K/H212S | A16S/A26E/E31K/D174K/R195L/P210E/H212S/T226S/E318Q | + | | ++ |
| 481/482 | H13P/D17H/E26A | H13P/A16S/D17H/E31K/D174K/R195L/K196V/P210E/T226S/E318Q | ++ | | +++ |
| 483/484 | D17G/T83E/D263S | A16S/D17G/A26E/E31K/T83E/D174K/R19SL/K196V/P210E/T226S/D263S/E318Q | ++ | + | ++ |
| 485/486 | D17G/T83E/K173Q/R227E | A16S/D17G/A26E/E31K/T83E/K173Q/D174K/R195L/K196V/P210E/T226S/R227E/E318Q | ++ | | +++ |
| 487/488 | D17G/R227E/V301I | A16S/D17G/A26E/E31K/D174K/R195L/K196V/P210E/T226S/R227E/V301I/E318Q | ++ | | ++ |
| 489/490 | D17G/T83E/R227E/D263S | A16S/D17G/A26E/E31K/T83E/D174K/R19SL/K196V/P210E/T226S/R227E/D263S/E318Q | + | | ++ |
| 491/492 | D17G/T83E/P125E | A16S/D17G/A26E/E31K/T83E/P125E/D174K/R195L/K196V/P210E/T226S/E318Q | ++ | + | +++ |
| 493/494 | D17G/T83E/K173Q | A16S/D17G/A26E/E31K/T83E/K173Q/D174K/R195L/K196V/P210E/T226S/E318Q | +++ | ++ | +++ |
| 495/496 | D17G/D263S/V301I | A16S/D17G/A26E/E31K/D174K/R195L/K196V/P210E/T226S/D263S/V301I/E318Q | ++ | + | ++ |
| 497/498 | D17G/P125E | A16S/D17G/A26E/E31K/P125E/D174K/R195L/K196V/P210E/T226S/E318Q | ++ | + | ++ |
| 499/500 | D17G/T83E/V301I | A16S/D17G/A26E/E31K/T83E/D174K/R19SL/K196V/P210E/T226S/V301I/E318Q | +++ | ++ | +++ |
| 501/502 | D17G/K173Q | A16S/D17G/A26E/E31K/K173Q/D174K/R195L/K196V/P210E/T226S/E318Q | ++ | + | +++ |
| 503/504 | D17G/T83E/R227E | A16S/D17G/A26E/E31K/T83E/D174K/R19SL/K196V/P210E/T226S/R227E/E318Q | ++ | | +++ |
| 505/506 | D17G/R227E | A16S/D17G/A26E/E31K/D174K/R195L/K196V/P210E/T226S/R227E/E318Q | + | | ++ |
| 507/508 | D17G | A16S/D17G/A26E/E31K/D174K/R195L/K196V/P210E/T226S/E318Q | ++ | + | +++ |
| 509/510 | D17G/P125E/R227E | A16S/D17G/A26E/E31K/P125E/D174K/R195L/K196V/P210E/T226S/R227E/E318Q | + | | ++ |
| 511/512 | D17G/T83E | A16S/D17G/A26E/E31K/T83E/D174K/R19SL/K196V/P210E/T226S/E318Q | +++ | ++ | +++ |
| 513/514 | D17G/D263S/V301T | A16S/D17G/A26E/E31K/D174K/R195L/K196V/P210E/T226S/D263S/V301T/E318Q | ++ | + | ++ |
| 515/516 | F128A | A16S/A26E/E31K/F128A/D174K/R195L/K196V/P210E/T226S/E318Q | | + | |
| 517/518 | A76S | A16S/A26E/E31K/A76S/D174K/R195L/K196V/P210E/T226S/E318Q | + | + | + |
| 519/520 | G141Q | A16S/A26E/E31K/G141Q/D174K/R195L/K196V/P210E/T226S/E318Q | | + | |
| 521/522 | F110V | A16S/A26E/E31K/F110V/D174K/R195L/K196V/P210E/T226S/E318Q | | + | |
| 523/524 | A79S | A16S/A26E/E31K/A79S/D174K/R195L/K196V/P210E/T226S/E318Q | ++ | ++ | ++ |
| 525/526 | M117A | A16S/A26E/E31K/M117A/D174K/R195L/K196V/P210E/T226S/E318Q | + | ++ | |
| 527/528 | A79G | A16S/A26E/E31K/A79G/D174K/R195L/K196V/P210E/T226S/E318Q | ++ | ++ | +++ |
| 529/530 | L61M | A16S/A26E/E31K/L61M/D174K/R195L/K196V/P210E/T226S/E318Q | + | + | |

All activities were determined relative to the reference polypeptide of SEQ ID NO: 320. Levels of increased activity are defined as follows: “+” 0.9 to 1.1, “++” > 1.1, “+++” > 1.5

### Example 7

### Screening Results of ODC Variants Based on SEQ ID NO: 396

[0392] Based on the results from Table 4-3, SEQ ID NO: 396 was chosen as the backbone. Beneficial mutations identified from Table 4-1 and Table 4-3, and diversity from homologs were recombined into the backbone. Additionally, to generate new diversity, variants with mutagenesis at additional positions were also constructed on SEQ ID NO: 396. The variants were assayed in triplicate for ODC activity at pH 2.4 with 4 mM potassium oxalate after a 1 hour simulated gastric challenge (0.4 mg/mL pepsin, pH 2.6) and unchallenged ODC activity at pH 2.4 and 5.5 with 4 mM potassium oxalate as described in Example 3. Analysis of the data relative to SEQ ID NO: 396 are listed in Table 4-4.

TABLE 4-4

Oxalate decarboxylase activity Relative to SEQ ID NO: 396

| SEQ ID NO: (nt/aa) | Amino Acid Differences (Relative to SEQ ID NO: 396) | Amino Acid Differences (Relative to SEQ ID NO: 4) | FIOP Unchallenged Activity at pH 2.4 Relative to SEQ ID NO: 396 | FIOP Unchallenged Activity at pH 5.5 Relative to SEQ ID NO: 396 | FIOP Pepsin Challenge Relative to SEQ ID NO: 396 |
|---|---|---|---|---|---|
| 531/532 | P13H/H17G/A79G | A16S/D17G/A26E/E31K/A79G/D174K/R195L/P210E/T226S/E318Q | ++++ | ++++ | +++ |
| 533/534 | P13H/L14V/H17G/T60V/A79G | L14V/A16S/D17G/A26E/E31K/T60V/A79G/D174K/R195L/P210E/T226S/E318Q | +++ | ++++ | +++ |
| 535/536 | P13H/H17G/A79G/T83E | A16S/D17G/A26E/E31K/A79G/T83E/D174K/R195L/P210E/T226S/E318Q | ++++ | ++++ | +++ |
| 537/538 | P13H/H17G/A79G/V301I | A16S/D17G/A26E/E31K/A79G/D174K/R195L/P210E/T226S/V3011/E318Q | ++++ | ++++ | +++ |
| 539/540 | P13H/L14V/H17G/T60V/A79G/H212S | L14V/A16S/D17G/A26E/E31K/T60V/A79G/D174K/R195L/P210E/H212S/T226S/E318Q | +++ | +++ | +++ |
| 541/542 | H17G/T60V/L197E | H13P/A16S/D17G/A26E/E31K/T60V/D174K/R195L/L197E/P210E/T226S/E318Q | +++ | +++ | + |
| 543/544 | P13H/T60V/H212S | A16S/D17H/A26E/E31K/T60V/D174K/R195L/P210E/H212S/T226S/E318Q | +++ | +++ | +++ |
| 545/546 | P13H/L14V/H17G/T60V/A79G/T83E/V301I | L14V/A16S/D17G/A26E/E31K/T60V/A79G/T83E/D174K/R195L/P210E/T226S/V301I/E318Q | +++ | ++++ | +++ |
| 547/548 | P13H/H17G/T60V/A79G | A16S/D17G/A26E/E31K/T60V/A79G/D174K/R195L/P210E/T226S/E318Q | ++++ | ++++ | +++ |
| 549/550 | H17G/T60V/V301I | H13P/A16S/D17G/A26E/E31K/T60V/D174K/R195L/P210E/T226S/V301I/E318Q | +++ | +++ | +++ |
| 551/552 | L14V/H17G/A79G | H13P/L14V/A16S/D17G/A26E/E31K/A79G/D174K/R195L/P210E/T226S/E318Q | +++ | +++ | +++ |
| 553/554 | H17G/T60V/T83E | H13P/A16S/D17G/A26E/E31K/T60V/T83E/D174K/R195L/P210E/T226S/E318Q | +++ | +++ | +++ |
| 555/556 | H17G/A79G | H13P/A16S/D17G/A26E/E31K/A79G/D174K/R195L/P210E/T226S/E318Q | +++ | +++ | +++ |
| 557/558 | P13H/H17G/T60V/A79G/T83E/V301I | A16S/D17G/A26E/E31K/T60V/A79G/T83E/D174K/R195L/P210E/T226S/V301I/E318Q | ++++ | ++++ | +++ |
| 559/560 | T342P | H13P/A16S/D17H/A26E/E31K/D174K/R195L/P210E/T226S/E318Q/T342P | ++ | ++ | +++ |
| 561/562 | K52T/A190Q | H13P/A16S/D17H/A26E/E31K/K52T/D174K/A190Q/R195L/P210E/T226S/E318Q | + | ++ | + |
| 563/564 | Q94N/A190Q | H13P/A16S/D17H/A26E/E31K/Q94N/D174K/A190Q/R195L/P210E/T226S/E318Q | ++ | ++ | + |
| 565/566 | A190Q/T342P/Q351E | H13P/A16S/D17H/A26E/E31K/D174K/A190Q/R195L/P210E/T226S/E318Q/T342P/Q351E | ++ | ++ | + |
| 567/568 | P13H/A79G | A16S/D17H/A26E/E31K/A79G/D174K/R195L/P210E/T226S/E318Q | +++ | ++++ | +++ |
| 569/570 | P13H/A96L | A16S/D17H/A26E/E31K/A96L/D174K/R195L/P210E/T226S/E318Q | +++ | +++ | +++ |
| 571/572 | S273A | H13P/A16S/D17H/A26E/E31K/D174K/R195L/P210E/T226S/S273A/E318Q | +++ | ++ | ++ |
| 573/574 | A126T | H13P/A16S/D17H/A26E/E31K/A126T/D174K/R195L/P210E/T226S/E318Q | + | ++ | ++ |
| 575/576 | A96K | H13P/A16S/D17Ή/A26E/E31K/A96K/D174K/R195L/P210E/T226S/E318Q | ++ | ++ | ++ |
| 577/578 | A79S | HI3P/A16S/D17H/A26E/E31K/A79S/D174K/R195L/P210E/T226S/E318Q | +++ | +++ | +++ |
| 579/580 | T269S | H13P/A16S/D17H/A26E/E31K/D174K/R195L/P210E/T226S/T269S/E318Q | ++ | ++ | ++ |
| 581/582 | G40S | H13P/A16S/D17H/A26E/E31K/G40S/D174K/R195L/P210E/T226S/E318Q | ++ | + | +++ |
| 583/584 | A96L | H13P/A16S/D17H/A26E/E31K/A96L/D174K/R195L/P210E/T226S/E318Q | +++ | ++ | +++ |
| 585/586 | T44S | H13P/A16S/D17H/A26E/E31K/T44S/D174K/R195L/P210E/T226S/E318Q | + | ++ | + |
| 587/588 | A96R | H13P/A16S/D17H/A26E/E31K/A96R/D174K/R195L/P210E/T226S/E318Q | +++ | +++ | +++ |
| 589/590 | A79G | H13P/A16S/D17H/A26E/E31K/A79G/D174K/R195L/P210E/T226S/E318Q | ++ | ++ | ++ |
| 591/592 | S267R | H13P/A16S/D17H/A26E/E31K/D174K/R195L/P210E/T226S/S267R/E318Q | ++ | ++ | ++ |
| 593/594 | 1266V | H13P/A16S/D17Ή/A26E/E31K/D174K/R195L/P210E/T226S/I266V/E318Q | ++ | ++ | ++ |
| 595/596 | N160T | H13P/A16S/D17Ή/A26E/E31K/N160T/D174K/R195L/P210E/T226S/E318Q | + | + | + |
| 597/598 | Y277T | H13P/A16S/D17Ή/A26E/E31K/D174K/R195L/P210E/T226S/Y277T/E318Q | ++ | ++ | + |
| 599/600 | I149T | H13P/A16S/D17H/A26E/E31K/I149T/D174K/R195L/P210E/T226S/E318Q | ++ | ++ | + |
| 601/602 | T22R | H13P/A16S/D17H/T22R/A26E/E31K/D174K/R195L/P210E/T226S/E318Q | ++ | ++ | ++ |
| 603/604 | V234L | H13P/A16S/D17H/A26E/E31K/D174K/R195L/P210E/T226S/V234L/E318Q | +++ | ++ | ++ |
| 605/606 | I54L | H13P/A16S/D17H/A26E/E31K/I54L/D174K/R195L/P210E/T226S/E318Q | ++ | ++ | ++ |
| 607/608 | S297Y | H13P/A16S/D17H/A26E/E31K/D174K/R195L/P210E/T226S/S297Y/E318Q | ++ | ++ | +++ |
| 609/610 | Y277A | H13P/A16S/D17H/A26E/E31K/D174K/R195L/P210E/T226S/Y277A/E318Q | +++ | ++ | ++ |
| 611/612 | D106C | H13P/A16S/D17H/A26E/E31K/D106C/D174K/R195L/P210E/T226S/E318Q | ++ | ++ | ++ |
| 613/614 | P13H/A43C | A16S/D17H/A26E/E31K/A43C/D174K/R195L/P210E/T226S/E318Q | +++ | +++ | +++ |

All activities were determined relative to the reference polypeptide of SEQ ID NO: 396. Levels of increased activity are defined as follows: “+” 0.5 to 0.9, “++” > 0.9, “+++” > 1.1,“++++”> 2

### Example 8

### Screening Results of ODC Variants Based on SEQ ID NO: 670

[0393] Based on the results from Table 4-4, SEQ ID NO: 552 was selected, codon optimized, and 6xHis-tag removed to generate SEQ ID NO: 670, which was used as the next backbone. To generate new diversity, variants with mutagenesis at different positions were constructed into the backbone. The variants were assayed in triplicate for ODC activity at pH 2.5 with 4 mM potassium oxalate after a 1 hour simulated gastric challenge (0.8 mg/mL pepsin, pH 2.6) and unchallenged ODC activity at pH 2.5 and 5.5 with 4 mM potassium oxalate as described in Example 3. Analysis of the data relative to SEQ ID NO: 670 are listed in Table 4-5.

TABLE 4-5

Oxalate decarboxylase activity Relative to SEQ ID NO: 670

| SEQ ID NO: (nt/aa) | Amino Acid Differences (Relative to SEQ ID NO: 670) | Amino Acid Differences (Relative to SEQ ID NO: 2) | FIOP Unchallenged Activity at pH 2.5 Relative to SEQ ID NO: 670 | FIOP Unchallenged Activity at pH 5.5 Relative to SEQ ID NO: 670 | FIOP Pepsin Challenge Relative to SEQ ID NO: 670 |
|---|---|---|---|---|---|
| 615/616 | K37G | H13P/L14V/A16S/D17G/A26E/E31K/K37G/A79G/D174K/R195L/P210E/T226S/E318Q | ++ | ++ | +++ |
| 617/618 | P125F | H13P/L14V/A16S/D17G/A26E/E31K/A79G/P125F/D174K/R195L/P210E/T226S/E318Q | + | + | +++ |
| 619/620 | G162K | H13P/L14V/A16S/D17G/A26E/E31K/A79G/G162K/D174K/R195L/P210E/T226S/E318Q | ++ | ++ | +++ |
| 621/622 | Q94T | H13P/L14V/A16S/D17G/A26E/E31K/A79G/Q94T/D174K/R195L/P210E/T226S/E318Q | ++ | ++ | +++ |
| 623/624 | L195W | H13P/L14V/A16S/D17G/A26E/E31K/A79G/D174K/R195W/P210E/T226S/E318Q | ++ | ++ | +++ |
| 625/626 | H85R | H13P/L14V/A16S/D17G/A26E/E31K/A79G/H85R/D174K/R195L/P210E/T226S/E318Q | ++ | ++ | +++ |
| 627/628 | G103S | H13P/L14V/A16S/D17G/A26E/E31K/A79G/G103S/D174K/R195L/P210E/T226S/E318Q | ++ | ++ | +++ |
| 629/630 | K232T | H13P/L14V/A16S/D17G/A26E/E31K/A79G/D174K/R195L/P210E/T226S/K232T/E318Q | ++ | ++ | +++ |
| 631/632 | A189R | H13P/L14V/A16S/D17G/A26E/E31K/A79G/D174K/A189R/R195L/P210E/T226S/E318Q | ++ | ++ | +++ |
| 633/634 | A186N | H13P/L14V/A16S/D17G/A26E/E31K/A79G/D174K/A186N/R195L/P210E/T226S/E318Q | ++ | ++ | +++ |
| 635/636 | A155R | H13P/L14V/A16S/D17G/A26E/E31K/A79G/A155R/D174K/R195L/P210E/T226S/E318Q | ++ | ++ | +++ |
| 637/638 | Q193A | H13P/L14V/A16S/D17G/A26E/E31K/A79G/D174K/Q193A/R195L/P210E/T226S/E318Q | ++ | ++ | +++ |
| 639/640 | T342A | H13P/L14V/A16S/D17G/A26E/E31K/A79G/D174K/R195L/P210E/T226S/E318Q/T342A | ++ | ++ | +++ |
| 641/642 | K196V | H13P/L14V/A16S/D17G/A26E/E31K/A79G/D174K/R195L/K196V/P210E/T226S/E318Q | ++ | + | +++ |
| 643/644 | P63S | H13P/L14V/A16S/D17G/A26E/E31K/P63S/A79G/D174K/R195L/P210E/T226S/E318Q | + | ++ | +++ |
| 645/646 | K33R | H13P/L14V/A16S/D17G/A26E/E31K/K33R/A79G/D174K/R195L/P210E/T226S/E318Q | + | + | ++ |
| 647/648 | Q351H | H13P/L14V/A16S/D17G/A26E/E31K/A79G/D174K/R195L/P210E/T226S/E318Q/Q351H | ++ | ++ | ++ |
| 649/650 | Q193G | H13P/L14V/A16S/D17G/A26E/E31K/A79G/D174K/Q193G/R195L/P210E/T226S/E318Q | ++ | ++ | ++ |
| 651/652 | P125S | H13P/L14V/A16S/D17G/A26E/E31K/A79G/P125S/D174K/R195L/P210E/T226S/E318Q | ++ | ++ | ++ |
| 653/654 | T314S | H13P/L14V/A16S/D17G/A26E/E31K/A79G/D174K/R195L/P210E/T226S/T314S/E318Q | ++ | ++ | ++ |
| 655/656 | T187R | H13P/L14V/A16S/D17G/A26E/E31K/A79G/D174K/T187R/R195L/P210E/T226S/E318Q | +++ | ++ | ++ |
| 657/658 | D303T | H13P/L14V/A16S/D17G/A26E/E31K/A79G/D174K/R195L/P210E/T226S/D303T/E318Q | ++ | ++ | ++ |
| 659/660 | G103V | H13P/L14V/A16S/D17G/A26E/E31K/A79G/G103V/D174K/R195L/P210E/T226S/E318Q | ++ | ++ | ++ |
| 661/662 | G103Q | H13P/L14V/A16S/D17G/A26E/E31K/A79G/G103Q/D174K/R195L/P210E/T226S/E318Q | ++ | ++ | ++ |
| 663/664 | A155V | H13P/L14V/A16S/D17G/A26E/E31K/A79G/A155V/D174K/R195L/P210E/T226S/E318Q | + | + | ++ |
| 665/666 | P164R | H13P/L14V/A16S/D17G/A26E/E31K/A79G/P164R/D174K/R195L/P210E/T226S/E318Q | + | ++ | ++ |
| 667/668 | P153S | H13P/L14V/A16S/D17G/A26E/E31K/A79G/P153S/D174K/R195L/P210E/T226S/E318Q | + | ++ | ++ |
| 669/670 | | H13P/L14V/A16S/D17G/A26E/E31K/A79G/D174K/R195L/P210E/T226S/E318Q | ++ | ++ | ++ |
| 671/672 | K37R | H13P/L14V/A16S/D17G/A26E/E31K/K37R/A79G/D174K/R195L/P210E/T226S/E318Q | ++ | ++ | ++ |
| 673/674 | E346Q | H13P/L14V/A16S/D17G/A26E/E31K/A79G/D174K/R195L/P210E/T226S/E318Q/E346Q | ++ | ++ | ++ |
| 675/676 | E346G | H13P/L14V/A16S/D17G/A26E/E31K/A79G/D174K/R195L/P210E/T226S/E318Q/E346G | ++ | ++ | ++ |
| 677/678 | Q351A | H13P/L14V/A16S/D17G/A26E/E31K/A79G/D174K/R195L/P210E/T226S/E318Q/Q351A | ++ | ++ | ++ |
| 679/680 | V183K | H13P/L14V/A16S/D17G/A26E/E31K/A79G/D174K/V183K/R195L/P210E/T226S/E318Q | ++ | ++ | ++ |
| 681/682 | D19C | H13P/L14V/A16S/D17G/D19C/A26E/E31K/A79G/D174K/R195L/P210E/T226S/E318Q | + | ++ | ++ |
| 683/684 | T187L | H13P/L14V/A16S/D17G/A26E/E31K/A79G/D174K/T187L/R195L/P210E/T226S/E318Q | ++ | + | ++ |
| 685/686 | D123S | H13P/L14V/A16S/D17G/A26E/E31K/A79G/D123S/D174K/R195L/P210E/T226S/E318Q | ++ | + | ++ |
| 687/688 | H85G | H13P/L14V/A16S/D17G/A26E/E31K/A79G/H85G/D174K/R195L/P210E/T226S/E318Q | ++ | ++ | ++ |
| 689/690 | T187S | H13P/L14V/A16S/D17G/A26E/E31K/A79G/D174K/T187S/R195L/P210E/T226S/E318Q | ++ | ++ | ++ |
| 691/692 | V183C | H13P/L14V/A16S/D17G/A26E/E31K/A79G/D174K/V183C/R195L/P210E/T226S/E318Q | + | ++ | ++ |
| 693/694 | D123G | H13P/L14V/A16S/D17G/A26E/E31K/A79G/D123G/D174K/R195L/P210E/T226S/E318Q | ++ | ++ | ++ |
| 695/696 | K350R | H13P/L14V/A16S/D17G/A26E/E31K/A79G/D174K/R195L/P210E/T226S/E318Q/K350R | ++ | ++ | ++ |
| 697/698 | H85E | H13P/L14V/A16S/D17G/A26E/E31K/A79G/H85E/D174K/R195L/P210E/T226S/E318Q | ++ | ++ | ++ |
| 699/700 | E205A | H13P/L14V/A16S/D17G/A26E/E31K/A79G/D174K/R195L/E205A/P210E/T226S/E318Q | +++ | ++ | + |
| 701/702 | K284R | H13P/L14V/A16S/D17G/A26E/E31K/A79G/D174K/R195L/P210E/T226S/K284R/E318Q | ++ | ++ | + |
| 703/704 | P199V | H13P/L14V/A16S/D17G/A26E/E31K/A79G/D174K/R195L/P199V/P210E/T226S/E318Q | + | ++ | + |
| 705/706 | E346W | H13P/L14V/A16S/D17G/A26E/E31K/A79G/D174K/R195L/P210E/T226S/E318Q/E346W | + | ++ | + |
| 707/708 | S343W | H13P/L14V/A16S/D17G/A26E/E31K/A79G/D174K/R195L/P210E/T226S/E318Q/S343W | + | ++ | + |
| 709/710 | P164V | H13P/L14V/A16S/D17G/A26E/E31K/A79G/P164V/D174K/R195L/P210E/T226S/E318Q | + | ++ | + |
| 711/712 | L200N | H13P/L14V/A16S/D17G/A26E/E31K/A79G/D174K/R195L/L200N/P210E/T226S/E318Q | + | ++ | + |
| 713/714 | T342E | H13P/L14V/A16S/D17G/A26E/E31K/A79G/D174K/R195L/P210E/T226S/E318Q/T342E | ++ | ++ | + |
| 715/716 | E208G | H13P/L14V/A16S/D1G/A26E/E31K/A79G/D174K/R195L/E208G/P210E/T226S/E318Q | ++ | ++ | + |
| 717/718 | D169A | H13P/L14V/A16S/D17G/A26E/E31K/A79G/D169A/D174K/R195L/P210E/T226S/E318Q | + | ++ | + |
| 719/720 | A190G | H13P/L14V/A16S/D17G/A26E/E31K/A79G/D174K/A190G/R195L/P210E/T226S/E318Q | + | ++ | + |
| 721/722 | K284A | H13P/L14V/A16S/D17G/A26E/E31K/A79G/D174K/R195L/P210E/T226S/K284A/E318Q | ++ | ++ | + |
| 723/724 | P199G | H13P/L14V/A16S/D1G/A26E/E31K/A79G/D174K/R195L/P199G/P210E/T226S/E318Q | + | ++ | + |
| 725/726 | L121W | H13P/L14V/A16S/D17G/A26E/E31K/A79G/L121W/D174K/R195L/P210E/T226S/E318Q | ++ | ++ | + |
| 727/728 | K196S | H13P/L14V/A16S/D17G/A26E/E31K/A79G/D174K/R195L/K196S/P210E/T226S/E318Q | + | + | + |

All activities were determined relative to the reference polypeptide of SEQ ID NO: 670. Levels of increased activity are defined as follows: “+” 0.5 to 0.9, “++” > 0.9, “+++” > 1.1,“++++”> 2

### Example 9

### Screening Results of ODC Variants Based on SEQ ID NO: 616

[0394] Based on the results from Table 4-5, SEQ ID NO: 616 was chosen as the backbone. To generate new diversity, beneficial mutations from Table 4-3 and Table 4-5 variants were recombined into the backbone, along with reversion mutations of neutral and deleterious mutations from Tables 4-1, 4-2, and 4-4. Additionally, to generate new diversity, variants with mutagenesis at different positions were constructed into the backbone. The variants were assayed in triplicate for ODC activity at pH 2.5 with 4 mM potassium oxalate after a 1-2 hour simulated gastric challenge (0.8 mg/mL pepsin, pH 2.5 or pH 2.4) and unchallenged ODC activity at pH 2.5 and 5.5 with 4 mM potassium oxalate as described in Example 3. Analysis of the data relative to SEQ ID NO: 616 are listed in Table 4-6.

TABLE 4-6

Oxalate decarboxylase activity Relative to SEQ ID NO: 616

| SEQ ID NO: (nt/aa) | Amino Acid Differences (Relative to SEQ ID NO: 616) | Amino Acid Differences (Relative to SEQ ID NO: 2) | FIOP Unchallenged Activity at pH 2.5 Relative to SEQ ID NO: 616 | FIOP Unchallenged Activity at pH 5.5 Relative to SEQ ID NO: 616 | FIOP Pepsin Challenge (1 hr) Relative to SEQ ID NO: 616 | FIOP Pepsin Challenge (2 hrs) Relative to SEQ ID NO: 616 |
|---|---|---|---|---|---|---|
| 729/730 | V14L/E26A/T60V/Q318E | H13P/A16S/D17G/E31K/K37G/T60V/A79G/D174K/R195L/P210E/T226S | + | + | ++ | ++++ |
| 731/732 | V14L/E26A/T60V/Q94T/G162K/H212S | H13P/A16S/D17G/E31K/K37G/T60V/A79G/Q94T/G162K/D174K/R195L/P210E/H212S/T226S/E318Q | + | | ++ | ++++ |
| 733/734 | T60V/G162K/S226T | H13P/L14V/A16S/D17G/A26E/E31K/K37G/T60V/A79G/G162K/D174K/R195L/P210E/E318Q | + | + | ++ | +++ |
| 735/736 | T60V | H13P/L14V/A16S/D17G/A26E/E31K/K37G/T60V/A79G/D174K/R195L/P210E/T226S/E318Q | + | + | ++ | ++ |
| 737/738 | V14L/P125F/G162K/H212S/Q318E | H13P/A16S/D17G/A26E/E31K/K37G/A79G/P125F/G162K/D174K/R195L/P210E/H212S/T226S | | | ++ | +++ |
| 739/740 | T60V/P125F/S226T | H13P/L14V/A16S/D17G/A26E/E31K/K37G/T60V/A79G/P125F/D174K/R195L/P210E/E318Q | | | ++ | ++ |
| 741/742 | V14L/P125F/G162K/S226T | H13P/A16S/D17G/A26E/E31K/K37G/A79G/P125F/G162K/D174K/R195L/P210E/E318Q | | + | ++ | +++ |
| 743/744 | E26A/T60V/G162K/S226T/Q318E | H13P/L14V/A16S/D17G/E31K/K37G/T60V/A79G/G162K/D174K/R195L/P210E | + | + | ++ | +++ |
| 745/746 | V14L/E26A/Q94T/G162K/H212S/S226T | H13P/A16S/D17G/E31K/K37G/A79G/Q94T/G162K/D174K/R195L/P210E/H212S/E318Q | + | | ++ | +++ |
| 747/748 | V14L/T60V/G162K | H13P/A16S/D17G/A26E/E31K/K37G/T60V/A79G/G162K/D174K/R195L/P210E/T226S/E318Q | + | + | ++ | ++++ |
| 749/750 | V14L/T60V/G162K/S226T | H13P/A16S/D17G/A26E/E31K/K37G/T60V/A79G/G162K/D174K/R195L/P210E/E318Q | + | + | ++ | ++++ |
| 751/752 | V14L/Q94T/G162K/Q318E | H13P/A16S/D17G/A26E/E31K/K37G/A79G/Q94T/G162K/D174K/R195L/P210E/T226S | | + | ++ | +++ |
| 753/754 | V14L/Q94T/G162K | H13P/A16S/D17G/A26E/E31K/K37G/A79G/Q94T/G162K/D174K/R195L/P210E/T226S/E318Q | + | + | ++ | |
| 755/756 | V14L/T60V/S226T | H13P/A16S/D17G/A26E/E31K/K37G/T60V/A79G/D174K/R195L/P210E/E318Q | + | + | ++ | |
| 757/758 | V14L/T60V/Q94T/H212S | H13P/A16S/D17G/A26E/E31K/K37G/T60V/A79G/Q94T/D174K/R195L/P210E/H212S/T226S/E318Q | + | | ++ | ++++ |
| 759/760 | V14L/T60V/G162K/H212S | H13P/A16S/D17G/A26E/E31K/K37G/T60V/A79G/G162K/D174K/R195L/P210E/H212S/T226S/E318Q | + | | ++ | ++++ |
| 761/762 | V14L/G162K | H13P/A16S/D17G/A26E/E31K/K37G/A79G/G162K/D174K/R195L/P210E/T226S/E318Q | + | + | ++ | +++ |
| 763/764 | V14L/Q94T/H212S/Q318E | H13P/A16S/D17G/A26E/E31K/K37G/A79G/Q94T/D174K/R195L/P210E/H212S/T226S | | | ++ | |
| 765/766 | V14L/T60V | H13P/A16S/D17G/A26E/E31K/K37G/T60V/A79G/D174K/R195L/P210E/T226S/E318Q | + | + | ++ | ++++ |
| 767/768 | V14L/E26A/G162K | H13P/A16S/D17G/E31K/K37G/A79G/G162K/D174K/R195L/P210E/T226S/E318Q | + | + | ++ | ++++ |
| 769/770 | V14L | H13P/A16S/D17G/A26E/E31K/K37G/A79G/D174K/R195L/P210E/T226S/E318Q | + | + | ++ | +++ |
| 771/772 | V14L/Q318E | H13P/A16S/D17G/A26E/E31K/K37G/A79G/D174K/R195L/P210E/T226S | | | ++ | ++ |
| 773/774 | V14L/G162K/S226T/Q318E | H13P/A16S/D17G/A26E/E31K/K37G/A79G/G162K/D174K/R195L/P210E | | | ++ | |
| 775/776 | V14L/P125F/H212S | H13P/A16S/D17G/A26E/E31K/K37G/A79G/P125F/D174K/R195L/P210E/H212S/T226S/E318Q | | | ++ | ++ |
| 777/778 | V14L/P125F/S226T/Q318E | H13P/A16S/D17G/A26E/E31K/K37G/A79G/P125F/D174K/R195L/P210E | | | ++ | |
| 779/780 | V14L/E26A/T60V/G162K | H13P/A16S/D17G/E31K/K37G/T60V/A79G/G162K/D174K/R195L/P210E/T226S/E318Q | + | + | ++ | +++ |
| 781/782 | V14L/P125F/G162K/H212S/S226T | H13P/A16S/D17G/A26E/E31K/K37G/A79G/P125F/G162K/D174K/R195L/P210E/H212S/E318Q | | | ++ | ++ |
| 783/784 | V14L/Q94T/P125F/G162K/Q318E | H13P/A16S/D17G/A26E/E31K/K37G/A79G/Q94T/P125F/G162K/D174K/R195L/P210E/T226S | + | + | ++ | +++ |
| 785/786 | V14L/P125F/S226T | H13P/A16S/D17G/A26E/E31K/K37G/A79G/P125F/D174K/R195L/P210E/E318Q | | | ++ | ++ |
| 787/788 | Y277R | H13P/L14V/A16S/D17G/A26E/E31K/K37G/A79G/D174K/R195L/P210E/T226S/Y277R/E318Q | | + | ++ | |
| 789/790 | Y277C | H13P/L14V/A16S/D17G/A26E/E31K/K37G/A79G/D174K/R195L/P210E/T226S/Y277C/E318Q | + | + | ++ | ++ |
| 791/792 | Y277T | H13P/L14V/A16S/D17G/A26E/E31K/K37G/A79G/D174K/R195L/P210E/T226S/Y277T/E318Q | + | + | ++ | ++ |
| 793/794 | S166R | H13P/L14V/A16S/D17G/A26E/E31K/K37G/A79G/S166R/D174K/R195L/P210E/T226S/E318Q | + | + | ++ | ++ |
| 795/796 | T233H | H13P/L14V/A16S/D17G/A26E/E31K/K37G/A79G/D174K/R195L/P210E/T226S/T233H/E318Q | | | ++ | + |
| 797/798 | T83R | H13P/L14V/A16S/D17G/A26E/E31K/K37G/A79G/T83R/D174K/R195L/P210E/T226S/E318Q | + | + | ++ | + |
| 799/800 | T60M | H13P/L14V/A16S/D17G/A26E/E31K/K37G/T60M/A79G/D174K/R195L/P210E/T226S/E318Q | + | + | ++ | ++ |
| 801/802 | Y277I | H13P/L14V/A16S/D17G/A26E/E31K/K37G/A79G/D174K/R195L/P210E/T226S/Y277I/E318Q | + | + | ++ | ++ |
| 803/804 | Y277M | H13P/L14V/A16S/D17G/A26E/E31K/K37G/A79G/D174K/R195L/P210E/T226S/Y277M/E318Q | + | + | ++ | + |
| 805/806 | T5S | TSS/H13P/L14V/A16S/D17G/A26E/E31K/K37G/A79G/D174K/R195L/P210E/T226S/E318Q | + | + | ++ | ++ |
| 807/808 | T342R | H13P/L14V/A16S/D17G/A26E/E31K/K37G/A79G/D174K/R195L/P210E/T226S/E318Q/T342R | + | + | ++ | + |
| 809/810 | Y277V | H13P/L14V/A16S/D17G/A26E/E31K/K37G/A79G/D174K/R195L/P210E/T226S/Y277V/E318Q | + | + | ++ | ++ |
| 811/812 | T60R | H13P/L14V/A16S/D17G/A26E/E31K/K37G/T60R/A79G/D174K/R195L/P210E/T226S/E31Q | | | ++ | ++ |
| 813/814 | A96R | H13P/L14V/A16S/D17G/A26E/E31K/K37G/A79G/A96R/D174K/R195L/P210E/T226S/E31Q | ++ | + | ++ | ++ |
| 815/816 | K284S | H13P/L14V/A16S/D17G/A26E/E31K/K37G/A79G/D174K/R195L/P210E/T226S/K284S/E318Q | + | + | ++ | + |
| 817/818 | E26R | H13P/L14V/A16S/D17G/A26R/E31K/K37G/A79G/D174K/R195L/P210E/T226S/E318Q | + | + | ++ | ++ |
| 819/820 | E26N | H13P/L14V/A16S/D17G/A26N/E31K/K37G/A79G/D174K/R195L/P210E/T226S/E318Q | + | + | ++ | |
| 821/822 | T83W | H13P/L14V/A16S/D17G/A26E/E31K/K37G/A79G/T83W/D174K/R195L/P210E/T226S/E318Q | | | ++ | |

All activities were determined relative to the reference polypeptide of SEQ ID NO: 616. Levels of increased activity are defined as follows: “+” 0.9 to 1.1, “++” > 1.1, “+++” > 2.0,“++++”>3.0

### Example 10

### Screening Results of ODC Variants Based on SEQ ID NO: 750

[0395] Based on the results from Table 4-6, SEQ ID NO: 750 was chosen as the backbone. Beneficial mutations identified from Table 7 were recombined into the backbone, along with reversions of mutations from Table 4-6. The variants were assayed for ODC activity at pH 2.4 with 4 mM potassium oxalate after a 1 hour simulated gastric challenge (0.8 mg/mL pepsin, pH 2.2), and unchallenged ODC activity at pH 2.4 and 5.5 with 4 mM potassium oxalate as described in Example 3. Analysis of the data relative to SEQ ID NO: 750 are listed in Table 4-7.

TABLE 4-7

Oxalate decarboxylase activity Relative to SEQ ID NO: 750

| SEQ ID NO: (nt/aa) | Amino Acid Differences (Relative to SEQ ID NO: 750) | Amino Acid Differences (Relative to SEQ ID NO: 2) | FIOP Unchallenged Activity at pH 2.5 Relative to SEQ ID NO: 750 | FIOP Unchallenged Activity at pH 5.5 Relative to SEQ ID NO: 750 | FIOP Pepsin Challenge Relative to SEQ ID NO: 750 |
|---|---|---|---|---|---|
| 823/824 | T5S/E26A/T83W/T342R | T5S/H13P/A16S/D17G/E31K/K37G/T60V/A79G/T83W/G162K/D174K/R195L/P210E/E318Q/T342R | + | | +++ |
| 825/826 | T5S/E26A/Y277T | T5S/H13P/A16S/D17G/E31K/K37G/T60V/A79G/G162K/D174K/R195L/P210E/Y277T/E318Q | | | ++++ |
| 827/828 | T5S/A96L/Y277T | T5S/H13P/A16S/D17G/A26E/E31K/K37G/T60V/A79G/A96L/G162K/D174K/R195L/P210E/Y277T/E318Q | ++ | + | ++++ |
| 829/830 | T5S/T83W/Y277T/T342R | T5S/H13P/A16S/D17G/A26E/E31K/K37G/T60V/A79G/T83W/G162K/D174K/R195L/P210E/Y277T/E318Q/T342R | + | | +++ |
| 831/832 | E26A/T83W/Y277T | H13P/A16S/D17G/E31K/K37G/T60V/A79G/T83W/G162K/D174K/R195L/P210E/Y277T/E318Q | + | | ++++ |
| 833/834 | T5S/E26A/T83W/Y277V | T5S/H13P/A16S/D17G/E31K/K37G/T60V/A79G/T83W/G162K/D174K/R195L/P210E/Y277V/E318Q | + | | ++++ |
| 835/836 | T5S/Y277T/T342R | T5S/H13P/A16S/D17G/A26E/E31K/K37G/T60V/A79G/G162K/D174K/R195L/P210E/Y277T/E318Q/T342R | + | | ++++ |
| 837/838 | T5S/T83W/Y277V/T342R | T5S/H13P/A16S/D17G/A26E/E31K/K37G/T60V/A79G/T83W/G162K/D174K/R195L/P210E/Y277V/E318Q/T342R | ++ | | +++ |
| 839/840 | T5S/E26A/S166R/Y277T | T5S/H13P/A16S/D17G/E31K/K37G/T60V/A79G/G162K/S166R/D174K/R195L/P210E/Y277T/E318Q | ++ | | +++ |
| 841/842 | T83W/Y277T/T342R | H13P/A16S/D17G/A26E/E31K/K37G/T60V/A79G/T83W/G162K/D174K/R195L/P210E/Y277T/E318Q/T342R | ++ | | ++++ |
| 843/844 | T83R/A96L/Y277V/T342R | H13P/A16S/D17G/A26E/E31K/K37G/T60V/A79G/T83R/A96L/G162K/D174K/R195L/P210E/Y277V/E318Q/T342R | ++ | + | +++ |
| 845/846 | T83W/A96L/Y277T | H13P/A16S/D17G/A26E/E31K/K37G/T60V/A79G/T83W/A96L/G162K/D174K/R195L/P210E/Y277T/E318Q | ++ | | ++++ |
| 847/848 | E26A/T83W/Y277V/T342R | H13P/A16S/D17G/E31K/K37G/T60V/A79G/T83W/G162K/D174K/R195L/P210E/Y277V/E318Q/T342R | ++ | | ++++ |
| 849/850 | T5S/E26A/T83W/Y277V/T342R | T5S/H13P/A16S/D17G/E31K/K37G/T60V/A79G/T83W/G162K/D174K/R195L/P210E/Y277V/E318Q/T342R | ++ | | +++ |
| 851/852 | T5S/T83R/Y277T/T342R | T5S/H13P/A16S/D17G/A26E/E31K/K37G/T60V/A79G/T83R/G162K/D174K/R195L/P210E/Y277T/E318Q/T342R | ++ | | +++ |
| 853/854 | T5S/E26A/T83W/Y277T/T342R | T5S/H13P/A16S/D17G/E31K/K37G/T60V/A79G/T83W/G162K/D174K/R195L/P210E/Y277T/E318Q/T342R | ++ | | +++ |
| 855/856 | T5S/T83R/Y277V | T5S/H13P/A16S/D17G/A26E/E31K/K37G/T60V/A79G/T83R/G162K/D174K/R195L/P210E/Y277V/E318Q | + | + | +++ |
| 857/858 | E26A/Y277T | H13P/A16S/D17G/E31K/K37G/T60V/A79G/G162K/D174K/R195L/P210E/Y277T/E318Q | + | | +++ |
| 859/860 | T83W/Y277T | H13P/A16S/D17G/A26E/E31K/K37G/T60V/A79G/T83W/G162K/D174K/R195L/P210E/Y277T/E318Q | + | | +++ |
| 861/862 | T5S/I35V/Y277T | T5S/H13P/A16S/D17G/A26E/E31K/I35V/K37G/T60V/A79G/G162K/D174K/R195L/P210E/Y277T/E318Q | | | +++ |
| 863/864 | T5S/E26A/T83R/A96R/Y277V | T5S/H13P/A16S/D17G/E31K/K37G/T60V/A79G/T83R/A96R/G162K/D174K/R195L/P210E/Y277V/E318Q | ++ | + | +++ |
| 865/866 | T5S/E26A/A96L/Y277T | T5S/H13P/A16S/D17G/E31K/K37G/T60V/A79G/A96L/G162K/D174K/R195L/P210E/Y277T/E318Q | ++ | + | +++ |
| 867/868 | T5S/Y277T | T5S/H13P/A16S/D17G/A26E/E31K/K37G/T60V/A79G/G162K/D174K/R195L/P210E/Y277T/E318Q | + | + | +++ |
| 869/870 | T5S/E26A/T83R/Y277T | T5S/H13P/A16S/D17G/E31K/K37G/T60V/A79G/T83R/G162K/D174K/R195L/P210E/Y277T/E318Q | ++ | + | +++ |
| 871/872 | T5S/T83R/Y277T | T5S/H13P/A16S/D17G/A26E/E31K/K37G/T60V/A79G/T83R/G162K/D174K/R195L/P210E/Y277T/E318Q | + | | ++++ |
| 873/874 | E26A/T83R/Y277V | H13P/A16S/D17G/E31K/K37G/T60V/A79G/T83R/G162K/D174K/R195L/P210E/Y277V/E318Q | ++ | + | +++ |
| 875/876 | T5S/E26A/Y277V | T5S/H13P/A16S/D17G/E31K/K37G/T60V/A79G/G162K/D174K/R195L/P210E/Y277V/E318Q | + | | +++ |
| 877/878 | T5S/S166R/Y277T | T5S/H13P/A16S/D17G/A26E/E31K/K37G/T60V/A79G/G162K/S166R/D174K/R195L/P210E/Y277T/E318Q | ++ | + | +++ |
| 879/880 | E26A/T83W/Y277V | H13P/A16S/D17G/E31K/K37G/T60V/A79G/T83W/G162K/D174K/R195L/P210E/Y277V/E318Q | + | + | +++ |
| 881/882 | E26A/T83W/A96L/Y277V/T342R | H13P/A16S/D17G/E31K/K37G/T60V/A79G/T83W/A96L/G162K/D174K/R195L/P210E/Y277V/E318Q/T342R | ++ | + | ++ |
| 883/884 | Y277T | H13P/A16S/D17G/A26E/E31K/K37G/T60V/A79G/G162K/D174K/R195L/P210E/Y277T/E318Q | + | + | ++++ |
| 885/886 | E26A/Y277T/T342R | H13P/A16S/D17G/E31K/K37G/T60V/A79G/G162K/D174K/R195L/P210E/Y277T/E318Q/T342R | ++ | + | +++ |
| 887/888 | T83W/Y277V/T342R | H13P/A16S/D17G/A26E/E31K/K37G/T60V/A79G/T83W/G162K/D174K/R195L/P210E/Y277V/E318Q/T342R | ++ | | +++ |
| 889/890 | T83R/Y277V | H13P/A16S/D17G/A26E/E31K/K37G/T60V/A79G/T83R/G162K/D174K/R195L/P210E/Y277V/E318Q | + | + | ++++ |
| 891/892 | T5S | T5S/H13P/A16S/D17G/A26E/E31K/K37G/T60V/A79G/G162K/D174K/R195L/P210E/E318Q | + | + | +++ |
| 893/894 | E26A/Y277V | H13P/A16S/D17G/E31K/K37G/T60V/A79G/G162K/D174K/R195L/P210E/Y277V/E318Q | + | | ++++ |
| 895/896 | T83R/Y277T | H13P/A16S/D17G/A26E/E31K/K37G/T60V/A79G/T83R/G162K/D174K/R195L/P210E/Y277T/E318Q | + | + | ++++ |
| 897/898 | T5S/T83W/A96R/Y277T/T342R | T5S/H13P/A16S/D17G/A26E/E31K/K37G/T60V/A79G/T83W/A96R/G162K/D174K/R195L/P210E/Y277T/E318Q/T342R | ++ | | +++ |
| 899/900 | T5S/Y277V | T5S/H13P/A16S/D17G/A26E/E31K/K37G/T60V/A79G/G162K/D174K/R195L/P210E/Y277V/E318Q | + | | ++++ |
| 901/902 | Y277V | H13P/A16S/D17G/A26E/E31K/K37G/T60V/A79G/G162K/D174K/R195L/P210E/Y277V/E318Q | + | + | ++++ |
| 903/904 | T5S/Y277V/T342R | T5S/H13P/A16S/D17G/A26E/E31K/K37G/T60V/A79G/G162K/D174K/R195L/P210E/Y277V/E318Q/T342R | ++ | + | ++++ |
| 905/906 | T83W/A96L/Y277V | H13P/A16S/D17G/A26E/E31K/K37G/T60V/A79G/T83W/A96L/G162K/D174K/R195L/P210E/Y277V/E318Q | ++ | | ++++ |
| 907/908 | T83W/Y277V | H13P/A16S/D17G/A26E/E31K/K37G/T60V/A79G/T83W/G162K/D174K/R195L/P210E/Y277V/E318Q | + | | ++++ |

All activities were determined relative to the reference polypeptide of SEQ ID NO: 750. Levels of increased activity are defined as follows: “+” 0.9 to 1.1, “++” > 1.1, “+++” > 2.0,“++++”>3.0

### Example 11

### Screening Results of ODC Variants Based on SEQ ID NO: 906

[0396] Single point mutations were constructed on the ODC polypeptide of SEQ ID NO: 906 through site saturation mutagenesis at the 16 positions that differ from the ODC polypeptide of SEQ ID NO: 2. Additionally, reversion mutations at these 16 positions were recombined into SEQ ID NO: 906. The variants were assayed for ODC activity at pH 2.8 with 4 mM potassium oxalate after a 1 hour simulated gastric challenge (0.3 mg/mL pepsin, pH 3.2), and at pH 2.5 with 4 mM potassium oxalate after a 1 hour simulated gastric challenge (0.8 mg/mL pepsin, pH 2.8) as described in Example 3. Unchallenged ODC activity was assayed at pH 2.8 and 5.5 with 4 mM potassium oxalate as described in Example 3. Analysis of the activity data in reference to both ODC polypeptides of SEQ ID NO: 906 and SEQ ID NO: 2, are listed in Tables 5-1 and 5-2.

TABLE 5-1

Oxalate decarboxylase activity Relative to SEQ ID NO: 4 or SEQ ID NO: 906

| SEQ ID NO: (nt/aa) | Amino Acid Differences (Relative to SEQ ID NO: 906) | Amino Acid Differences (Relative to SEQ ID NO: 2) | FIOP Unchallenged Activity pH 2.8 relative to SEQ ID NO: 2 | FIOP Unchallenged Activity pH 4.5 relative to SEQ ID NO: 2 | FIOP 0.3 g/L Pepsin Challenge relative to SEQ ID NO: 2 | FIOP Unchallenged Activity pH 2.8 relative to SEQ ID NO: 906 | FIOP Unchallenged Activity pH 4.5 relative to SEQ ID NO: 906 | FIOP 0.8 g/L Pepsin Challenge relative to SEQ ID NO: 906 |
|---|---|---|---|---|---|---|---|---|
| ½ | P13H/S16A/G17D/E26A/K31E/G37K/V60T/G79A/W83T/L96A/K162G/K174D/L195R/E210P/V277Y/Q318E | | + | + | + | | + | |
| 905/906 | | H13P/A16S/D17G/A26E/E31K/K37G/T60V/A79G/T83W/A96L/G162K/D174K/R195L/P210E/Y277V/E318Q | ++ | + | ++++ | + | + | + |
| 909/910 | E26L | H13P/A16S/D17G/A26L/E31K/K37G/T60V/A79G/T83W/A96L/G162K/D174K/R195L/P210E/Y277V/E318Q | | | + | | | |
| 911/912 | K31W | H13P/A16S/D17G/A26E/E31W/K37G/T60V/A79G/T83W/A96L/G162K/D174K/R195L/P210E/Y277V/E318Q | + | | ++++ | | | |
| 913/914 | L96K | H13P/A16S/D17G/A26E/E31K/K37G/T60V/A79G/T83W/A96K/G162K/D174K/R195L/P210E/Y277V/E318Q | ++ | + | ++++ | + | + | |
| 915/916 | V60R | H13P/A16S/D17G/A26E/E31K/K37G/T60R/A79G/T83W/A96L/G162K/D174K/R195L/P210E/Y277V/E318Q | ++ | | ++++ | | + | + |
| 917/918 | Q318D | H13P/A16S/D17G/A26E/E31K/K37G/T60V/A79G/T83W/A96L/G162K/D174K/R195L/P210E/Y277V/E318D | ++ | | ++++ | | | |
| 919/920 | E26G | H13P/A16S/D17G/A26G/E31K/K37G/T60V/A79G/T83W/A96L/G162K/D174K/R195L/P210E/Y277V/E318Q | ++ | | ++++ | | | |
| 921/922 | E210R | H13P/A16S/D17G/A26E/E31K/K37G/T60V/A79G/T83W/A96L/G162K/D174K/R195L/P210R/Y277V/E318Q | ++ | | ++++ | | | |
| 923/924 | K31R | H13P/A16S/D17G/A26E/E31R/K37G/T60V/A79G/T83W/A96L/G162K/D174K/R195L/P210E/Y277V/E318Q | ++ | | ++++ | + | | |
| 925/926 | V277F | H13P/A16S/D17G/A26E/E31K/K37G/T60V/A79G/T83W/A96L/G162K/D174K/R195L/P210E/Y277F/E318Q | ++ | + | ++++ | + | + | |
| 927/928 | G37M | H13P/A16S/D17G/A26E/E31K/K37M/T60V/A79G/T83W/A96L/G162K/D174K/R195L/P210E/Y277V/E318Q | ++ | | ++++ | | | |
| 929/930 | L96P | H13P/A16S/D17G/A26E/E31K/K37G/T60V/A79G/T83W/A96P/G162K/D174K/R195L/P210E/Y277V/E318Q | + | | ++++ | | | |
| 931/932 | S16V | H13P/A16V/D17G/A26E/E31K/K37G/T60V/A79G/T83W/A96L/G162K/D174K/R195L/P210E/Y277V/E318Q | ++ | + | ++++ | + | + | |
| 933/934 | V60A | H13P/A16S/D17G/A26E/E31K/K37G/T60A/A79G/T83W/A96L/G162K/D174K/R195L/P210E/Y277V/E318Q | ++ | | ++++ | | | |
| 935/936 | E26R | H13P/A16S/D17G/A26R/E31K/K37G/T60V/A79G/T83W/A96L/G162K/D174K/R195L/P210E/Y277V/E318Q | ++ | | +++ | | | |
| 937/938 | K31G | H13P/A16S/D17G/A26E/E31G/K37G/T60V/A79G/T83W/A96L/G162K/D174K/R195L/P210E/Y277V/E318Q | ++ | | ++++ | | | |
| 939/940 | L195G | H13P/A16S/D17G/A26E/E31K/K37G/T60V/A79G/T83W/A96L/G162K/D174K/R195G/P210E/Y277V/E318Q | ++ | | ++++ | | | |
| 941/942 | Q318R | H13P/A16S/D17G/A26E/E31K/K37G/T60V/A79G/T83W/A96L/G162K/D174K/R195L/P210E/Y277V/E318R | ++ | | ++++ | | | |
| 943/944 | E26V | H13P/A16S/D17G/A26V/E31K/K37G/T60V/A79G/T83W/A96L/G162K/D174K/R195L/P210E/Y277V/E318Q | | | | | | |
| 945/946 | G79M | H13P/A16S/D17G/A26E/E31K/K37G/T60V/A79M/T883W/A96L/G162K/D174K/R195L/P210E/Y277V/E318Q | | | | | | |
| 947/948 | S16M | H13P/A16M/D17G/A26E/E31K/K37G/T60V/A79G/T83W/A96L/G162K/D174K/R195L/P210E/Y277V/E318Q | ++ | + | ++++ | + | + | |
| 949/950 | E210A | H13P/A16S/D17G/A26E/E31K/K37G/T60V/A79G/T83W/A96L/G162K/D174K/R195L/P210A/Y277V/E318Q | ++ | + | +++ | + | + | |
| 951/952 | L96R | H13P/A16S/D17G/A26E/E31K/K37G/T60V/A79G/T83W/A96R/G162K/D174K/R195L/P210E/Y277V/E318Q | ++ | + | ++++ | + | ++ | ++ |
| 953/954 | G37E | H13P/A16S/D17G/A26E/E31K/K37E/T60V/A79G/T83W/A96L/G162K/D174K/R195L/P210E/Y277V/E318Q | ++ | | +++ | | | |
| 955/956 | S16G | H13P/A16G/D17G/A26E/E31K/K37G/T60V/A79G/T83W/A96L/G162K/D174K/R195L/P210E/Y277V/E318Q | ++ | + | ++++ | + | + | ++ |
| 957/958 | G17W | H13P/A16S/D17W/A26E/E31K/K37G/T60V/A79G/T83W/A96L/G162K/D174K/R195L/P210E/Y277V/E318Q | + | | ++++ | | | |
| 959/960 | P13G | H13G/A16S/D17G/A26E/E31K/K37G/T60V/A79G/T83W/A96L/G162K/D174K/R195L/P210E/Y277V/E318Q | ++ | | ++++ | | | |
| 961/962 | G79E | H13P/A16S/D17G/A26E/E31K/K37G/T60V/A79E/T83W/A96L/G162K/D174K/R195L/P210E/Y277V/E318Q | | | | | | |
| 963/964 | V277T | H13P/A16S/D17G/A26E/E31K/K37G/T60V/A79G/T83W/A96L/G162K/D174K/R195L/P210E/Y277T/E318Q | +++ | + | ++++ | + | + | ++ |
| 965/966 | V60Q | H13P/A16S/D17G/A26E/E31K/K37G/T60Q/A79G/T83W/A96L/G162K/D174K/R195L/P210E/Y277V/E318Q | +++ | + | ++++ | ++ | + | + |
| 967/968 | K31L | H13P/A16S/D17G/A26E/E31L/K37G/T60V/A79G/T83W/A96L/G162K/D174K/R195L/P210E/Y277V/E318Q | ++ | | ++++ | | | |
| 969/970 | L96G | H13P/A16S/D17G/A26E/E31K/K37G/T60V/A79G/T83W/A96G/G162K/D174K/R195L/P210E/Y277V/E318Q | ++ | | ++++ | | | |
| 971/972 | L96T | H13P/A16S/D17G/A26E/E31K/K37G/T60V/A79G/T83W/A96T/G162K/D174K/R195L/P210E/Y277V/E318Q | ++ | + | ++++ | + | ++ | ++ |
| 973/974 | V60G | H13P/A16S/D17G/A26E/E31K/K37G/T60G/A79G/T83W/A96L/G162K/D174K/R195L/P210E/Y277V/E318Q | ++ | | ++++ | | | |
| 975/976 | S16W | H13P/A16W/D17G/A26E/E31K/K37G/T60V/A79G/T83W/A96L/G162K/D174K/R195L/P210E/Y277V/E318Q | ++ | | ++++ | | | |
| 977/978 | P13T | H13T/A16S/D17G/A26E/E31K/K37G/T60V/A79G/T83W/A96L/G162K/D174K/R195L/P210E/Y277V/E318Q | ++ | | ++++ | | | |
| 979/980 | G79R | H13P/A16S/D17G/A26E/E31K/K37G/T60V/A79R/T83W/A96L/G162K/D174K/R195L/P210E/Y277V/E318Q | | | | | | |
| 981/982 | E26Y | H13P/A16S/D17G/A26E/E31K/K37G/T60V/A79G/T83W/A96L/G162K/D174K/R195L/P210E/Y277V/E318Q | | | | | | |
| 983/984 | E26S | H13P/A16S/D17G/A26S/E31K/K37G/T60V/A79G/T83W/A96L/G162K/D174K/R195L/P210E/Y277V/E318Q | +++ | + | ++++ | + | + | |
| 985/986 | L195R | H13P/A16S/D17G/A26E/E31K/K37G/T60V/A79G/T83W/A96L/G162K/D174K/P210E/Y277V/E318Q | +++ | + | ++++ | + | + | |
| 987/988 | G17R | H13P/A16S/D17R/A26E/E31K/K37G/T60V/A79G/T83W/A96L/G162K/D174K/R195L/P210E/Y277V/E318Q | ++ | | +++ | | | |
| 989/990 | P13V | H13V/A16S/D17G/A26E/E31K/K37G/T60V/A79G/T83W/A96L/G162K/D174K/R195L/P210E/Y277V/E318Q | ++ | | ++++ | | | |
| 991/992 | V277E | H13P/A16S/D17G/A26E/E31K/K37G/T60V/A79G/T83W/A96L/G162K/D174K/R195L/P210E/Y277E/E318Q | ++ | | ++++ | | | |
| 993/994 | G37L | H13P/A16S/D17G/A26E/E31K/K37L/T60V/A79G/T83W/A96L/G162K/D174K/R195L/P210E/Y277V/E318Q | ++ | | ++++ | | | |
| 995/996 | E210G | H13P/A16S/D17G/A26E/E31K/K37G/T60V/A79G/T83W/A96L/G162K/D174K/R195L/P210G/Y277V/E318Q | ++ | | ++++ | | | |
| 997/998 | V60L | H13P/A16S/D17G/A26E/E31K/K37G/T60L/A79G/T83W/A96L/G162K/D174K/R195L/P210E/Y277V/E318Q | ++ | | ++++ | | | |
| 999/1000 | P13L | H13L/A16S/D17G/A26E/E31K/K37G/T60V/A79G/T83W/A96L/G162K/D174K/R195L/P210E/Y277V/E318Q | ++ | | ++++ | | | |
| 1001/1002 | W83Y | H13P/A16S/D17G/A26E/E31K/K37G/T60V/A79G/T83Y/A96L/G162K/D174K/R195L/P210E/Y277V/E318Q | +++ | + | ++++ | ++ | ++ | ++ |
| 1003/1004 | G37W | H13P/A16S/D17G/A26E/E31K/K37W/T60V/A79G/T83W/A96L/G162K/D174K/R195L/P210E/Y277V/E318Q | | | +++ | | | |
| 1005/1006 | V277G | H13P/A16S/D17G/A26E/E31K/K37G/T60V/A79G/T83W/A96L/G162K/D174K/R195L/P210E/Y277G/E318Q | + | | ++++ | | | |
| 1007/1008 | W83R | H13P/A16S/D17G/A26E/E31K/K37G/T60V/A79G/T83R/A96L/G162K/D174K/R195L/P210E/Y277V/E318Q | +++ | + | ++++ | ++ | + | + |
| 1009/1010 | V60Y | H13P/A16S/D17G/A26E/E31K/K37G/T60Y/A79G/T83W/A96L/G162K/D174K/R195L/P210E/Y277V/E318Q | ++ | | ++++ | | | |
| 1011/1012 | E210S | H13P/A16S/D17G/A26E/E31K/K37G/T60V/A79G/T83W/A96L/G162K/D174K/R195L/P210S/Y277V/E318Q | ++ | | ++++ | | + | |
| 1013/1014 | Q318S | H13P/A16S/D17G/A26E/E31K/K37G/T60V/A79G/T83W/A96L/G162K/D174K/R195L/P210E/Y277V/E318S | ++ | | ++++ | | | |
| 1015/1016 | G17I | H13P/A16S/D17I/A26E/E31K/K37G/T60V/A79G/T83W/A96L/G162K/D174K/R195L/P210E/Y277V/E318Q | ++ | | ++++ | | | |
| 1017/1018 | G37S | H13P/A16S/D17G/A26E/E31K/K37S/T60V/A79G/T83W/A96L/G162K/D174K/R195L/P210E/Y277V/E318Q | ++ | | ++++ | | | |
| 1019/1020 | G79L | H13P/A16S/D17G/A26E/E31K/K37G/T60V/A79L/T83W/A96L/G162K/D174K/R195L/P210E/Y277V/E318Q | | | | | | |
| 1021/1022 | S16R | H13P/A16R/D17G/A26E/E31K/K37G/T60V/A79G/T83W/A96L/G162K/D174K/R195L/P210E/Y277V/E318Q | ++ | | ++++ | | | |
| 1023/1024 | L195S | H13P/A16S/D17G/A26E/E31K/K37G/T60V/A79G/T83W/A96L/G162K/D174K/R195S/P210E/Y277V/E318Q | ++ | + | ++++ | | + | |
| 1025/1026 | Q318G | H13P/A16S/D17G/A26E/E31K/K37G/T60V/A79G/T83W/A96L/G162K/D174K/R195L/P210E/Y277V/E318G | + | | ++++ | | | |
| 1027/1028 | E26C | H13P/A16S/D17G/A26C/E31K/K37G/T60V/A79G/T83W/A96L/G162K/D174K/R195L/P210E/Y277V/E318Q | +++ | + | ++++ | + | + | |
| 1029/1030 | P13R | H13R/A16S/D17G/A26E/E31K/K37G/T60V/A79G/T83W/A96L/G162K/D174K/R195L/P210E/Y277V/E318Q | ++ | | ++++ | | | |
| 1031/1032 | L195Y | H13P/A16S/D17G/A26E/E31K/K37G/T60V/A79G/T83W/A96L/G162K/D174K/R195Y/P210E/Y277V/E318Q | ++ | | ++++ | | | |
| 1033/1034 | V60E | H13P/A16S/D17G/A26E/E31K/K37G/T60E/A79G/T83W/A96L/G162K/D174K/R195L/P210E/Y277V/E318Q | +++ | + | ++++ | ++ | + | |
| 1035/1036 | K162V | H13P/A16S/D17G/A26E/E31K/K37G/T60V/A79G/T83W/A96L/G162V/D174K/R195L/P210E/Y277V/E318Q | +++ | + | ++++ | + | + | |
| 1037/1038 | S16C | H13P/A16C/D17G/A26E/E31K/K37G/T60V/A79G/T83W/A96L/G162K/D174K/R195L/P210E/Y277V/E318Q | ++ | | ++++ | | | |
| 1039/1040 | L96V | H13P/A16S/D17G/A26E/E31K/K37G/T60V/A79G/T83W/A96V/G162K/D174K/R195L/P210E/Y277V/E318Q | ++ | | ++++ | | + | |
| 1041/1042 | W83M | H13P/A16S/D17G/A26E/E31K/K37G/T60V/A79G/T83M/A96L/G162K/D174K/R195L/P210E/Y277V/E318Q | +++ | + | ++++ | ++ | + | ++ |
| 1043/1044 | K31M | H13P/A16S/D17G/A26E/E31M/K37G/T60V/A79G/T83W/A96L/G162K/D174K/R195L/P210E/Y277V/E318Q | ++ | | ++++ | + | + | |
| 1045/1046 | K174V | H13P/A16S/D17G/A26E/E31K/K37G/T60V/A79G/T83W/A96L/G162K/D174V/R195L/P210E/Y277V/E318Q | ++ | | ++++ | | | |
| 1047/1048 | V277L | H13P/A16S/D17G/A26E/E31K/K37G/T60V/A79G/T83W/A96L/G162K/D174K/R195L/P210E/Y277L/E318Q | ++ | | ++++ | | | |
| 1049/1050 | E26M | H13P/A16S/D17G/A26M/E31K/K37G/T60V/A79G/T83W/A96L/G162K/D174K/R195L/P210E/Y277V/E318Q | ++ | | +++ | | | |
| 1051/1052 | Q318M | H13P/A16S/D17G/A26E/E31K/K37G/T60V/A79G/T83W/A96L/G162K/D174K/R195L/P210E/Y277V/E318M | ++ | | ++++ | | | |
| 1053/1054 | E210N | H13P/A16S/D17G/A26E/E31K/K37G/T60V/A79G/T83W/A96L/G162K/D174K/R195L/P210N/Y277V/E318Q | ++ | | +++ | | | |
| 1055/1056 | E26A | H13P/A16S/D17G/E31K/K37G/T60V/A79G/T83W/A96L/G162K/D174K/R195L/P210E/Y277V/E318Q | +++ | + | ++++ | + | + | + |
| 1057/1058 | V277R | H13P/A16S/D17G/A26E/E31K/K37G/T60V/A79G/T83W/A96L/G162K/D174K/R195L/P210E/Y277R/E318Q | ++ | | ++++ | | | |
| 1059/1060 | L96F | H13P/A16S/D17G/A26E/E31K/K37G/T60V/A79G/T83W/A96F/G162K/D174K/R195L/P210E/Y277V/E318Q | +++ | + | ++++ | ++ | + | + |
| 1061/1062 | K174G | H13P/A16S/D17G/A26E/E31K/K37G/T60V/A79G/T83W/A96L/G162K/D174G/R195L/P210E/Y277V/E318Q | +++ | + | ++++ | + | + | ++ |
| 1063/1064 | S16Q | H13P/A16Q/D17G/A26E/E31K/K37G/T60V/A79G/T83W/A96L/G162K/D174K/R195L/P210E/Y277V/E318Q | ++ | + | ++++ | + | + | + |
| 1065/1066 | V277A | H13P/A16S/D17G/A26E/E31K/K37G/T60V/A79G/T83W/A96L/G162K/D174K/R195L/P210E/Y277A/E318Q | ++ | | ++++ | | | |
| 1067/1068 | P13Q | H13Q/A16S/D17G/A26E/E31K/K37G/T60V/A79G/T83W/A96L/G162K/D174K/R195L/P210E/Y277V/E318Q | ++ | | ++++ | | | |
| 1069/1070 | G79F | H13P/A16S/D17G/A26E/E31K/K37G/T60V/A79F/T83W/A96L/G162K/D174K/R195L/P210E/Y277V/E318Q | | | | | | |
| 1071/1072 | S16L | H13P/A16L/D17G/A26E/E31K/K37G/T60V/A79G/T83W/A96L/G162K/D174K/R195L/P210E/Y277V/E318Q | ++ | | ++++ | | | |
| 1073/1074 | L195N | H13P/A16S/D17G/A26E/E31K/K37G/T60V/A79G/T83W/A96L/G162K/D174K/R195N/P210E/Y277V/E318Q | ++ | ++ | ++++ | + | ++ | + |
| 1075/1076 | G79V | H13P/A16S/D17G/A26E/E31K/K37G/T60V/A79V/T83W/A96L/G162K/D174K/R195L/P210E/Y277V/E318Q | | | | | | |
| 1077/1078 | G17P | H13P/A16S/D17P/A26E/E31K/K37G/T60V/A79G/T83W/A96L/G162K/D174K/R195L/P210E/Y277V/E318Q | + | | ++++ | | | |
| 1079/1080 | V60P | H13P/A16S/D17G/A26E/E31K/K37G/T60P/A79G/T83W/A96L/G162K/D174K/R195L/P210E/Y277V/E318Q | | | | | | |
| 1081/1082 | G37P | H13P/A16S/D17G/A26E/E31K/K37P/T60V/A79G/T83W/A96L/G162K/D174K/R195L/P210E/Y277V/E318Q | | | ++ | | | |
| 1083/1084 | L96W | H13P/A16S/D17G/A26E/E31K/K37G/T60V/A79G/T83W/A96W/G162K/D174K/R195L/P210E/Y277V/E318Q | ++ | + | ++++ | + | + | + |
| 1085/1086 | K162T | H13P/A16S/D17G/A26E/E31K/K37G/T60V/A79G/T83W/A96L/G162T/D174K/R195L/P210E/Y277V/E318Q | +++ | + | ++++ | + | + | ++ |
| 1087/1088 | L195M | H13P/A16S/D17G/A26E/E31K/K37G/T60V/A79G/T83W/A96L/G162K/D174K/R195M/P210E/Y277V/E318Q | ++ | + | ++++ | + | ++ | |
| 1089/1090 | Q318W | H13P/A16S/D17G/A26E/E31K/K37G/T60V/A79G/T83W/A96L/G162K/D174K/R195L/P210E/Y277V/E318W | + | | ++++ | | | |
| 1091/1092 | G37R | H13P/A16S/D17G/A26E/E31K/K37R/T60V/A79G/T83W/A96L/G162K/D174K/R195L/P210E/Y277V/E318Q | ++ | | +++ | | | |
| 1093/1094 | S16T | H13P/A16T/D17G/A26E/E31K/K37G/T60V/A79G/T83W/A96L/G162K/D174K/R195L/P210E/Y277V/E318Q | ++ | + | ++++ | + | + | |
| 1095/1096 | E210M | H13P/A16S/D17G/A26E/E31K/K37G/T60V/A79G/T83W/A96L/G162K/D174K/R195L/P210M/Y277V/E318Q | ++ | | +++ | | | |
| 1097/1098 | K162Y | H13P/A16S/D17G/A26E/E31K/K37G/T60V/A79G/T83W/A96L/G162Y/D174K/R195L/P210E/Y277V/E318Q | ++ | | ++++ | + | | + |
| 1099/1100 | S16P | H13P/A16P/D17G/A26E/E31K/K37G/T60V/A79G/T83W/A96L/G162K/D174K/R195L/P210E/Y277V/E318Q | + | | ++++ | | | |
| 1101/1102 | W83E | H13P/A16S/D17G/A26E/E31K/K37G/T60V/A79G/T83E/A96L/G162K/D174K/R195L/P210E/Y277V/E318Q | ++ | + | ++++ | + | + | |
| 1103/1104 | V277M | H13P/A16S/D17G/A26E/E31K/K37G/T60V/A79G/T83W/A96L/G162K/D174K/R195L/P210E/Y277M/E318Q | +++ | + | ++++ | + | + | |
| 1105/1106 | K174L | H13P/A16S/D17G/A26E/E31K/K37G/T60V/A79G/T83W/A96L/G162K/D174L/R195L/P210E/Y277V/E318Q | ++ | | ++++ | | | |
| 1107/1108 | G17V | H13P/A16S/D17V/A26E/E31K/K37G/T60V/A79G/T83W/A96L/G162K/D174K/R195L/P210E/Y277V/E318Q | ++ | | +++ | | | |
| 1109/1110 | G17E | H13P/A16S/D17E/A26E/E31K/K37G/T60V/A79G/T83W/A96L/G162K/D174K/R195L/P210E/Y277V/E318Q | ++ | + | +++ | + | + | |
| 1111/1112 | G17L | H13P/A16S/D17L/A26E/E31K/K37G/T60V/A79G/T83W/A96L/G162K/D174K/R195L/P210E/Y277V/E318Q | ++ | | ++++ | | | |
| 1113/1114 | L96M | H13P/A16S/D17G/A26E/E31K/K37G/T60V/A79G/T83W/A96M/G162K/D174K/R195L/P210E/Y277V/E318Q | ++ | + | ++++ | + | + | + |
| 1115/1116 | Q318V | H13P/A16S/D17G/A26E/E31K/K37G/T60V/A79G/T83W/A96L/G162K/D174K/R195L/P210E/Y277V/E318V | ++ | | ++++ | | | |
| 1117/1118 | K174R | H13P/A16S/D17G/A26E/E31K/K37G/T60V/A79G/T83W/A96L/G162K/D174R/R195L/P210E/Y277V/E318Q | +++ | + | ++++ | ++ | ++ | |
| 1119/1120 | P13S | H13S/A16S/D17G/A26E/E31K/K37G/T60V/A79G/T83W/A96L/G162K/D174K/R195L/P210E/Y277V/E318Q | ++ | | ++++ | + | | |
| 1121/1122 | K174T | H13P/A16S/D17G/A26E/E31K/K37G/T60V/A79G/T83W/A96L/G162K/D174T/R195L/P210E/Y277V/E318Q | +++ | + | ++++ | + | + | + |
| 1123/1124 | P13Y | H13Y/A16S/D17G/A26E/E31K/K37G/T60V/A79G/T83W/A96L/G162K/D174K/R195L/P210E/Y277V/E318Q | + | | ++++ | | | |
| 1125/1126 | L195A | H13P/A16S/D17G/A26E/E31K/K37G/T60V/A79G/T83W/A96L/G162K/D174K/R195A/P210E/Y277V/E318Q | ++ | + | ++++ | | ++ | |
| 1127/1128 | V277W | H13P/A16S/D17G/A26E/E31K/K37G/T60V/A79G/T83W/A96L/G162K/D174K/R195L/P210E/Y277W/E318Q | ++ | + | ++++ | + | + | |
| 1129/1130 | V60M | H13P/A16S/D17G/A26E/E31K/K37G/T60M/A79G/T83W/A96L/G162K/D174K/R195L/P210E/Y277V/E318Q | ++ | | ++++ | + | + | |
| 1131/1132 | G17A | H13P/A16S/D17A/A26E/E31K/K37G/T60V/A79G/T83W/A96L/G162K/D174K/R195L/P210E/Y277V/E318Q | ++ | | ++++ | | + | |
| 1133/1134 | Q318A | H13P/A16S/D17G/A26E/E31K/K37G/T60V/A79G/T83W/A96L/G162K/D174K/R195L/P210E/Y277V/E318A | ++ | | ++++ | | | |
| 1135/1136 | K174H | H13P/A16S/D17G/A26E/E31K/K37G/T60V/A79G/T83W/A96L/G162K/D174H/R195L/P210E/Y277V/E318Q | ++ | + | ++++ | + | + | + |
| 1137/1138 | W83S | H13P/A16S/D17G/A26E/E31K/K37G/T60V/A79G/T83S/A96L/G162K/D174K/R195L/P210E/Y277V/E318Q | +++ | + | ++++ | ++ | ++ | |
| 1139/1140 | V277I | H13P/A16S/D17G/A26E/E31K/K37G/T60V/A79G/T83W/A96L/G162K/D174K/R195L/P210E/Y277I/E318Q | +++ | | ++++ | + | + | |
| 1141/1142 | P13E | H13E/A16S/D17G/A26E/E31K/K37G/T60V/A79G/T83W/A96L/G162K/D174K/R195L/P210E/Y277V/E318Q | ++ | | ++++ | | | |
| 1143/1144 | G17K | H13P/A16S/D17K/A26E/E31K/K37G/T60V/A79G/T83W/A96L/G162K/D174K/R195L/P210E/Y277V/E318Q | ++ | | ++++ | | | |
| 1145/1146 | E26K | H13P/A16S/D17G/A26K/E31K/K37G/T60V/A79G/T83W/A96L/G162K/D174K/R195L/P210E/Y277V/E318Q | ++ | | ++++ | | | |
| 1147/1148 | L96A | H13P/A16S/D17G/A26E/E31K/K37G/T60V/A79G/T83W/G162K/D174K/R195L/P210E/Y277V/E318Q | ++ | + | ++++ | | + | + |
| 1149/1150 | K174D | H13P/A16S/D17G/A26E/E31K/K37G/T60V/A79G/T83W/A96L/G162K/R195L/P210E/Y277V/E318Q | +++ | + | ++++ | + | + | ++ |
| 1151/1152 | E210V | H13P/A16S/D17G/A26E/E31K/K37G/T60V/A79G/T83W/A96L/G162K/D174K/R195L/P210V/Y277V/E318Q | ++ | | +++ | | | |
| 1153/1154 | K31S | H13P/A16S/D17G/A26E/E31S/K37G/T60V/A79G/T83W/A96L/G162K/D174K/R195L/P210E/Y277V/E318Q | ++ | | ++++ | | | |
| 1155/1156 | L195C | H13P/A16S/D17G/A26E/E31K/K37G/T60V/A79G/T83W/A96L/G162K/D174K/R195C/P210E/Y277V/E318Q | ++ | + | ++++ | | + | |
| 1157/1158 | G79K | H13P/A16S/D17G/A26E/E31K/K37G/T60V/A79K/T83W/A96L/G162K/D174K/R195L/P210E/Y277V/E318Q | | | | | | |
| 1159/1160 | V60W | H13P/A16S/D17G/A26E/E31K/K37G/T60W/A79G/T83W/A96L/G162K/D174K/R195L/P210E/Y277V/E318Q | ++ | | ++++ | | | |
| 1161/1162 | K174S | H13P/A16S/D17G/A26E/E31K/K37G/T60V/A79G/T83W/A96L/G162K/D174S/R195L/P210E/Y277V/E318Q | +++ | + | ++++ | + | + | ++ |
| 1163/1164 | P13I | H13I/A16S/D17G/A26E/E31K/K37G/T60V/A79G/T83W/A96L/G162K/D174K/R195L/P210E/Y277V/E318Q | ++ | | ++++ | | | |
| 1165/1166 | V60H | H13P/A16S/D17G/A26E/E31K/K37G/T60H/A79G/T83W/A96L/G162K/D174K/R195L/P210E/Y277V/E318Q | ++ | + | ++++ | + | + | |
| 1167/1168 | K31E | H13P/A16S/D17G/A26E/K37G/T60V/A79G/T83W/A96L/G162K/D174K/R195L/P210E/Y277V/E318Q | +++ | ++ | ++++ | ++ | ++ | |
| 1169/1170 | L96E | H13P/A16S/D17G/A26E/E31K/K37G/T60V/A79G/T83W/A96E/G162K/D174K/R195L/P210E/Y277V/E318Q | ++ | + | ++++ | + | + | ++ |
| 1171/1172 | W83K | H13P/A16S/D17G/A26E/E31K/K37G/T60V/A79G/T83K/A96L/G162K/D174K/R195L/P210E/Y277V/E318Q | +++ | + | ++++ | ++ | ++ | + |
| 1173/1174 | K31Q | H13P/A16S/D17G/A26E/E31Q/K37G/T60V/A79G/T83W/A96L/G162K/D174K/R195L/P210E/Y277V/E318Q | +++ | | ++++ | + | + | |
| 1175/1176 | S16K | H13P/A16K/D17G/A26E/E31K/K37G/T60V/A79G/T83W/A96L/G162K/D174K/R195L/P210E/Y277V/E318Q | ++ | | ++++ | | + | |
| 1177/1178 | K174M | H13P/A16S/D17G/A26E/E31K/K37G/T60V/A79G/T83W/A96L/G162K/D174M/R195L/P210E/Y277V/E318Q | ++ | | ++++ | | | |
| 1179/1180 | G37V | H13P/A16S/D17G/A26E/E31K/K37V/T60V/A79G/T83W/A96L/G162K/D174K/R195L/P210E/Y277V/E318Q | | | +++ | | | |
| 1181/1182 | G79D | H13P/A16S/D17G/A26E/E31K/K37G/T60V/A79D/T83W/A96L/G162K/D174K/R195L/P210E/Y277V/E318Q | | | | | | |
| 1183/1184 | Q318T | H13P/A16S/D17G/A26E/E31K/K37G/T60V/A79G/T83W/A96L/G162K/D174K/R195L/P210E/Y277V/E318T | ++ | | ++++ | | | |
| 1185/1186 | L195F | H13P/A16S/D17G/A26E/E31K/K37G/T60V/A79G/T83W/A96L/G162K/D174K/R195F/P210E/Y277V/E318Q | +++ | + | ++++ | + | + | |
| 1187/1188 | E26T | H13P/A16S/D17G/A26T/E31K/K37G/T60V/A79G/T83W/A96L/G162K/D174K/R195L/P210E/Y277V/E318Q | + | | ++++ | | | |
| 1189/1190 | K174Q | H13P/A16S/D17G/A26E/E31K/K37G/T60V/A79G/T83W/A96L/G162K/D174Q/R195L/P210E/Y277V/E318Q | +++ | + | +++ | + | + | ++ |
| 1191/1192 | W83L | H13P/A16S/D17G/A26E/E31K/K37G/T60V/A79G/T83L/A96L/G162K/D174K/R195L/P210E/Y277V/E318Q | ++ | + | ++++ | + | + | + |
| 1193/1194 | L96I | H13P/A16S/D17G/A26E/E31K/K37G/T60V/A79G/T83W/A96I/G162K/D174K/R195L/P210E/Y277V/E318Q | ++ | | ++++ | | + | |
| 1195/1196 | P13C | H13C/A16S/D17G/A26E/E31K/K37G/T60V/A79G/T83W/A96L/G162K/D174K/R195L/P210E/Y277V/E318Q | ++ | | ++++ | | | |
| 1197/1198 | P13A | H13A/A16S/D17G/A26E/E31K/K37G/T60V/A79G/T83W/A96L/G162K/D174K/R195L/P210E/Y277V/E318Q | ++ | + | ++++ | + | + | |
| 1199/1200 | L96Q | H13P/A16S/D17G/A26E/E31K/K37G/T60V/A79G/T83W/A96Q/G162K/D174K/R195L/P210E/Y277V/E318Q | ++ | | ++++ | + | + | ++ |
| 1201/1202 | P13H | A16S/D17G/A26E/E31K/K37G/T60V/A79G/T83W/A96L/G162K/D174K/R195L/P210E/Y277V/E318Q | ++ | | ++++ | | | |
| 1203/1204 | W83T | H13P/A16S/D17G/A26E/E31K/K37G/T60V/A79G/A96L/G162K/D174K/R195L/P210E/Y277V/E318Q | +++ | ++ | ++++ | ++ | ++ | + |
| 1205/1206 | K31Y | H13P/A16S/D17G/A26E/E31Y/K37G/T60V/A79G/T83W/A96L/G162K/D174K/R195L/P210E/Y277V/E318Q | ++ | | ++++ | | | |
| 1207/1208 | P13W | H13W/A16S/D17G/A26E/E31K/K37G/T60V/A79G/T83W/A96L/G162K/D174K/R195L/P210E/Y277V/E318Q | | | +++ | | | |
| 1209/1210 | V277P | H13P/A16S/D17G/A26E/E31K/K37G/T60V/A79G/T83W/A96L/G162K/D174K/R195L/P210E/Y277P/E318Q | | | ++ | | | |
| 1211/1212 | L195T | H13P/A16S/D17G/A26E/E31K/K37G/T60V/A79G/T83W/A96L/G162K/D174K/R195T/P210E/Y277V/E318Q | ++ | + | ++++ | | ++ | |
| 1213/1214 | V60S | H13P/A16S/D17G/A26E/E31K/K37G/T60S/A79G/T83W/A96L/G162K/D174K/R195L/P210E/Y277V/E318Q | ++ | | ++++ | | | |
| 1215/1216 | E26Q | H13P/A16S/D17G/A26Q/E31K/K37G/T60V/A79G/T83W/A96L/G162K/D174K/R195L/P210E/Y277V/E318Q | +++ | + | +++ | ++ | ++ | + |
| 1217/1218 | E210P | H13P/A16S/D17G/A26E/E31K/K37G/T60V/A79G/T83W/A96L/G162K/D174K/R195L/Y277V/E318Q | ++ | + | +++ | | + | |
| 1219/1220 | K174N | H13P/A16S/D17G/A26E/E31K/K37G/T60V/A79G/T83W/A96L/G162K/D174N/R195L/P210E/Y277V/E318Q | | | | | | |
| 1221/1222 | W83A | H13P/A16S/D17G/A26E/E31K/K37G/T60V/A79G/T83A/A96L/G162K/D174K/R195L/P210E/Y277V/E318Q | +++ | + | ++++ | ++ | ++ | + |
| 1223/1224 | K162E | H13P/A16S/D17G/A26E/E31K/K37G/T60V/A79G/T83W/A96L/G162E/D174K/R195L/P210E/Y277V/E318Q | +++ | + | +++ | ++ | + | ++ |
| 1225/1226 | G37F | H13P/A16S/D17G/A26E/E31K/K37F/T60V/A79G/T83W/A96L/G162K/D174K/R195L/P210E/Y277V/E318Q | + | | +++ | | | |
| 1227/1228 | G37Q | H13P/A16S/D17G/A26E/E31K/K37Q/T60V/A79G/T83W/A96L/G162K/D174K/R195L/P210E/Y277V/E318Q | ++ | | +++ | | | |
| 1229/1230 | K31T | H13P/A16S/D17G/A26E/E31T/K37G/T60V/A79G/T83W/A96L/G162K/D174K/R195L/P210E/Y277V/E318Q | ++ | + | ++++ | + | + | |
| 1231/1232 | K174A | H13P/A16S/D17G/A26E/E31K/K37G/T60V/A79G/T83W/A96L/G162K/D174A/R195L/P210E/Y277V/E318Q | ++ | | ++++ | + | + | + |
| 1233/1234 | W83F | H13P/A16S/D17G/A26E/E31K/K37G/T60V/A79G/T83F/A96L/G162K/D174K/R195L/P210E/Y277V/E318Q | +++ | + | ++++ | ++ | ++ | ++ |
| 1235/1236 | V60T | H13P/A16S/D17G/A26E/E31K/K37G/A79G/T83W/A96L/G162K/D174K/R195L/P210E/Y277V/E318Q | +++ | + | ++++ | ++ | + | |
| 1237/1238 | L96S | H13P/A16S/D17G/A26E/E31K/K37G/T60V/A79G/T83W/A96S/G162K/D174K/R195L/P210E/Y277V/E318Q | ++ | + | ++++ | + | ++ | + |
| 1239/1240 | W83V | H13P/A16S/D17G/A26E/E31K/K37G/T60V/A79G/T83V/A96L/G162K/D174K/R195L/P210E/Y277V/E318Q | +++ | ++ | ++++ | ++ | ++ | ++ |
| 1241/1242 | E210I | H13P/A16S/D17G/A26E/E31K/K37G/T60V/A79G/T83W/A96L/G162K/D174K/R195L/P210I/Y277V/E318Q | ++ | | ++++ | | | |
| 1243/1244 | S16D | H13P/A16D/D17G/A26E/E31K/K37G/T60V/A79G/T83W/A96L/G162K/D174K/R195L/P210E/Y277V/E318Q | ++ | | ++++ | | | |
| 1245/1246 | G37C | H13P/A16S/D17G/A26E/E31K/K37C/T60V/A79G/T83W/A96L/G162K/D174K/R195L/P210E/Y277V/E318Q | ++ | | +++ | | | |
| 1247/1248 | W83G | H13P/A16S/D17G/A26E/E31K/K37G/T60V/A79G/T83G/A96L/G162K/D174K/R195L/P210E/Y277V/E318Q | +++ | + | ++++ | ++ | ++ | |
| 1249/1250 | P13N | H13N/A16S/D17G/A26E/E31K/K37G/T60V/A79G/T83W/A96L/G162K/D174K/R195L/P210E/Y277V/E318Q | ++ | | ++++ | | | |
| 1251/1252 | K31V | H13P/A16S/D17G/A26E/E31V/K37G/T60V/A79G/T83W/A96L/G162K/D174K/R195L/P210E/Y277V/E318Q | +++ | | ++++ | + | + | |
| 1253/1254 | G79S | H13P/A16S/D17G/A26E/E31K/K37G/T60V/A79S/T83W/A96L/G162K/D174K/R195L/P210E/Y277V/E318Q | ++ | | ++++ | | | |
| 1255/1256 | L96Y | H13P/A16S/D17G/A26E/E31K/K37G/T60V/A79G/T83W/A96Y/G162K/D174K/R195L/P210E/Y277V/E318Q | ++ | + | ++++ | + | + | + |
| 1257/1258 | G17F | H13P/A16S/D17F/A26E/E31K/K37G/T60V/A79G/T83W/A96L/G162K/D174K/R195L/P210E/Y277V/E318Q | ++ | | ++++ | | | |
| 1259/1260 | G17M | H13P/A16S/D17M/A26E/E31K/K37G/T60V/A79G/T83W/A96L/G162K/D174K/R195L/P210E/Y277V/E318Q | ++ | + | ++++ | + | + | |
| 1261/1262 | S16A | H13P/D17G/A26E/E31K/K37G/T60V/A79G/T83W/A96L/G162K/D174K/R195L/P210E/Y277V/E318Q | +++ | + | ++++ | ++ | + | |
| 1263/1264 | W83P | H13P/A16S/D17G/A26E/E31K/K37G/T60V/A79G/T83P/A96L/G162K/D174K/R195L/P210E/Y277V/E318Q | | | + | | | |
| 1265/1266 | Q318L | H13P/A16S/D17G/A26E/E31K/K37G/T60V/A79G/T83W/A96L/G162K/D174K/R195L/P210E/Y277V/E318L | ++ | | ++++ | | | |
| 1267/1268 | G79Q | H13P/A16S/D17G/A26E/E31K/K37G/T60V/A79Q/T83W/A96L/G162K/D174K/R195L/P210E/Y277V/E318Q | | | | | | |
| 1269/1270 | G17S | H13P/A16S/D17S/A26E/E31K/K37G/T60V/A79G/T83W/A96L/G162K/D174K/R195L/P210E/Y277V/E318Q | ++ | + | ++++ | + | + | |
| 1271/1272 | E26W | H13P/A16S/D17G/A26W/E31K/K37G/T60V/A79G/T83W/A96L/G162K/D174K/R195L/P210E/Y277V/E318Q | | | | | | |
| 1273/1274 | L195D | H13P/A16S/D17G/A26E/E31K/K37G/T60V/A79G/T83W/A96L/G162K/D174K/R195D/P210E/Y277V/E318Q | ++ | + | ++++ | | + | |
| 1275/1276 | L195W | H13P/A16S/D17G/A26E/E31K/K37G/T60V/A79G/T83W/A96L/G162K/D174K/R195W/P210E/Y277V/E318Q | ++ | | ++++ | | | |
| 1277/1278 | V277S | H13P/A16S/D17G/A26E/E31K/K37G/T60V/A79G/T83W/A96L/G162K/D174K/R195L/P210E/Y277S/E318Q | ++ | | ++++ | + | + | |
| 1279/1280 | K174E | H13P/A16S/D17G/A26E/E31K/K37G/T60V/A79G/T83W/A96L/G162K/D174E/R195L/P210E/Y277V/E318Q | +++ | ++ | ++++ | ++ | ++ | ++ |
| 1281/1282 | S16E | H13P/A16E/D17G/A26E/E31K/K37G/T60V/A79G/T83W/A96L/G162K/D174K/R195L/P210E/Y277V/E318Q | ++ | + | ++++ | | + | |
| 1283/1284 | K162F | H13P/A16S/D17G/A26E/E31K/K37G/T60V/A79G/T83W/A96L/G162F/D174K/R195L/P210E/Y277V/E318Q | | | | | | |
| 1285/1286 | G79Y | H13P/A16S/D17G/A26E/E31K/K37G/T60V/A79Y/T83W/A96L/G162K/D174K/R195L/P210E/Y277V/E318Q | | | | | | |
| 1287/1288 | G79A | H13P/A16S/D17G/A26E/E31K/K37G/T60V/T83W/A96L/G162K/D174K/R195L/P210E/Y277V/E318Q | ++ | | ++++ | | | |
| 1289/1290 | G17C | H13P/A16S/D17C/A26E/E31K/K37G/T60V/A79G/T83W/A96L/G162K/D174K/R195L/P210E/Y277V/E318Q | ++ | | +++ | | | |
| 1291/1292 | G17Y | H13P/A16S/D17Y/A26E/E31K/K37G/T60V/A79G/T83W/A96L/G162K/D174K/R195L/P210E/Y277V/E318Q | ++ | | +++ | | | |
| 1293/1294 | L195Q | H13P/A16S/D17G/A26E/E31K/K37G/T60V/A79G/T83W/A96L/G162K/D174K/R195Q/P210E/Y277V/E318Q | + | | ++++ | | | |
| 1295/1296 | E26P | H13P/A16S/D17G/A26P/E31K/K37G/T60V/A79G/T83W/A96L/G162K/D174K/R195L/P210E/Y277V/E318Q | ++ | + | ++++ | + | + | + |
| 1297/1298 | L1951 | H13P/A16S/D17G/A26E/E31K/K37G/T60V/A79G/T83W/A96L/G162K/D174K/R195I/P210E/Y277V/E318Q | ++ | + | ++++ | | + | + |
| 1299/1300 | V60F | H13P/A16S/D17G/A26E/E31K/K37G/T60F/A79G/T83W/A96L/G162K/D174K/R195L/P210E/Y277V/E318Q | ++ | | ++++ | | | |
| 1301/1302 | E26I | H13P/A16S/D17G/A26I/E31K/K37G/T60V/A79G/T83W/A96L/G162K/D174K/R195L/P210E/Y277V/E318Q | | | | | | |
| 1303/1304 | G17D | H13P/A16S/A26E/E31K/K37G/T60V/A79G/T83W/A96L/G162K/D174K/R195L/P210E/Y277V/E318Q | ++ | + | ++++ | + | + | |
| 1305/1306 | Q318K | H13P/A16S/D17G/A26E/E31K/K37G/T60V/A79G/T83W/A96L/G162K/D174K/R195L/P210E/Y277V/E318K | ++ | | ++++ | | | |
| 1307/1308 | V60N | H13P/A16S/D17G/A26E/E31K/K37G/T60N/A79G/T83W/A96L/G162K/D174K/R195L/P210E/Y277V/E318Q | ++ | | ++++ | + | + | |
| 1309/1310 | S161 | H13P/A16I/D17G/A26E/E31K/K37G/T60V/A79G/T83W/A96L/G162K/D174K/R195L/P210E/Y277V/E318Q | ++ | | ++++ | | | |
| 1311/1312 | Q318H | H13P/A16S/D17G/A26E/E31K/K37G/T60V/A79G/T83W/A96L/G162K/D174K/R195L/P210E/Y277V/E318H | ++ | | ++++ | | | |
| 1313/1314 | G37A | H13P/A16S/D17G/A26E/E31K/K37A/T60V/A79G/T83W/A96L/G162K/D174K/R195L/P210E/Y277V/E318Q | ++ | | +++ | | | |
| 1315/1316 | L195V | H13P/A16S/D17G/A26E/E31K/K37G/T60V/A79G/T83W/A96L/G162K/D174K/R195V/P210E/Y277V/E318Q | ++ | + | ++++ | + | ++ | ++ |
| 1317/1318 | E210Y | H13P/A16S/D17G/A26E/E31K/K37G/T60V/A79G/T83W/A96L/G162K/D174K/R195L/P210Y/Y277V/E318Q | ++ | | +++ | | | |
| 1319/1320 | L195E | H13P/A16S/D17G/A26E/E31K/K37G/T60V/A79G/T83W/A96L/G162K/D174K/R195E/P210E/Y277V/E318Q | ++ | | ++++ | | + | |
| 1321/1322 | E26H | H13P/A16S/D17G/A26H/E31K/K37G/T60V/A79G/T83W/A96L/G162K/D174K/R195L/P210E/Y277V/E318Q | + | | ++++ | | | |
| 1323/1324 | P13D | H13D/A16S/D17G/A26E/E31K/K37G/T60V/A79G/T83W/A96L/G162K/D174K/R195L/P210E/Y277V/E318Q | ++ | | ++++ | | + | |
| 1325/1326 | K31P | H13P/A16S/D17G/A26E/E31P/K37G/T60V/A79G/T83W/A96L/G162K/D174K/R195L/P210E/Y277V/E318Q | ++ | + | ++++ | + | + | |
| 1327/1328 | E210W | H13P/A16S/D17G/A26E/E31K/K37G/T60V/A79G/T83W/A96L/G162K/D174K/R195L/P210W/Y277V/E318Q | + | | ++++ | | | |
| 1329/1330 | Q318P | H13P/A16S/D17G/A26E/E31K/K37G/T60V/A79G/T83W/A96L/G162K/D174K/R195L/P210E/Y277V/E318P | | | | | | |
| 1331/1332 | W83C | H13P/A16S/D17G/A26E/E31K/K37G/T60V/A79G/T83C/A96L/G162K/D174K/R195L/P210E/Y277V/E318Q | +++ | + | ++++ | ++ | ++ | + |
| 1333/1334 | K174P | H13P/A16S/D17G/A26E/E31K/K37G/T60V/A79G/T83W/A96L/G162K/D174P/R195L/P210E/Y277V/E318Q | ++ | | ++++ | | + | |
| 1335/1336 | E210T | H13P/A16S/D17G/A26E/E31K/K37G/T60V/A79G/T83W/A96L/G162K/D174K/R195L/P210T/Y277V/E318Q | ++ | | ++++ | | | |
| 1337/1338 | G17T | H13P/A16S/D17T/A26E/E31K/K37G/T60V/A79G/T83W/A96L/G162K/D174K/R195L/P210E/Y277V/E318Q | ++ | | ++++ | | | |
| 1339/1340 | G79T | H13P/A16S/D17G/A26E/E31K/K37G/T60V/A79T/T83W/A96L/G162K/D174K/R195L/P210E/Y277V/E318Q | | | ++ | | | |
| 1341/1342 | L96H | H13P/A16S/D17G/A26E/E31K/K37G/T60V/A79G/T83W/A96H/G162K/D174K/R195L/P210E/Y277V/E318Q | +++ | + | ++++ | + | ++ | + |
| 1343/1344 | G79W | H13P/A16S/D17G/A26E/E31K/K37G/T60V/A79W/T83W/A96L/G162K/D174K/R195L/P210E/Y277V/E318Q | | | | | | |
| 1345/1346 | K162L | H13P/A16S/D17G/A26E/E31K/K37G/T60V/A79G/T83W/A96L/G162L/D174K/R195L/P210E/Y277V/E318Q | +++ | + | ++++ | + | + | ++ |
| 1347/1348 | Q318E | H13P/A16S/D17G/A26E/E31K/K37G/T60V/A79G/T83W/A96L/G162K/D174K/R195L/P210E/Y277V | ++ | + | ++++ | + | + | ++ |
| 1349/1350 | K31A | H13P/A16S/D17G/A26E/E31A/K37G/T60V/A79G/T83W/A96L/G162K/D174K/R195L/P210E/Y277V/E318Q | ++ | + | ++++ | + | + | |
| 1351/1352 | E210C | H13P/A16S/D17G/A26E/E31K/K37G/T60V/A79G/T83W/A96L/G162K/D174K/R195L/P210C/Y277V/E318Q | ++ | | ++++ | | | |
| 1353/1354 | G17N | H13P/A16S/D17N/A26E/E31K/K37G/T60V/A79G/T83W/A96L/G162K/D174K/R195L/P210E/Y277V/E318Q | ++ | + | ++++ | | + | |
| 1355/1356 | L195K | H13P/A16S/D17G/A26E/E31K/K37G/T60V/A79G/T83W/A96L/G162K/D174K/R195K/P210E/Y277V/E318Q | ++ | | ++++ | | | |
| 1357/1358 | Q318Y | H13P/A16S/D17G/A26E/E31K/K37G/T60V/A79G/T83W/A96L/G162K/D174K/R195L/P210E/Y277V/E318Y | + | | ++++ | | | |
| 1359/1360 | G17H | H13P/A16S/D17H/A26E/E31K/K37G/T60V/A79G/T83W/A96L/G162K/D174K/R195L/P210E/Y277V/E318Q | ++ | + | +++ | + | + | |
| 1361/1362 | P13M | H13M/A16S/D17G/A26E/E31K/K37G/T60V/A79G/T83W/A96L/G162K/D174K/R195L/P210E/Y277V/E318Q | ++ | | ++++ | | | |
| 1363/1364 | V60D | H13P/A16S/D17G/A26E/E31K/K37G/T60D/A79G/T83W/A96L/G162K/D174K/R195L/P210E/Y277V/E318Q | ++ | | ++++ | | | |
| 1365/1366 | V277K | H13P/A16S/D17G/A26E/E31K/K37G/T60V/A79G/T83W/A96L/G162K/D174K/R195L/P210E/Y277K/E318Q | ++ | | ++++ | | | |
| 1367/1368 | S16N | H13P/A16N/D17G/A26E/E31K/K37G/T60V/A79G/T83W/A96L/G162K/D174K/R195L/P210E/Y277V/E318Q | ++ | | ++++ | | | |
| 1369/1370 | G79C | H13P/A16S/D17G/A26E/E31K/K37G/T60V/A79C/T83W/A96L/G162K/D174K/R195L/P210E/Y277V/E318Q | | | +++ | | | |
| 1371/1372 | P13K | H13K/A16S/D17G/A26E/E31K/K37G/T60V/A79G/T83W/A96L/G162K/D174K/R195L/P210E/Y277V/E318Q | ++ | | ++++ | | | |
| 1373/1374 | V60K | H13P/A16S/D17G/A26E/E31K/K37G/T60K/A79G/T83W/A96L/G162K/D174K/R195L/P210E/Y277V/E318Q | +++ | + | ++++ | ++ | + | + |
| 1375/1376 | G37N | H13P/A16S/D17G/A26E/E31K/K37N/T60V/A79G/T83W/A96L/G162K/D174K/R195L/P210E/Y277V/E318Q | ++ | | ++++ | | + | |
| 1377/1378 | V60I | H13P/A16S/D17G/A26E/E31K/K37G/T60I/A79G/T83W/A96L/G162K/D174K/R195L/P210E/Y277V/E318Q | ++ | + | ++++ | + | ++ | |
| 1379/1380 | K162D | H13P/A16S/D17G/A26E/E31K/K37G/T60V/A79G/T83W/A96L/G162D/D174K/R195L/P210E/Y277V/E318Q | +++ | + | ++++ | ++ | ++ | + |
| 1381/1382 | K162I | H13P/A16S/D17G/A26E/E31K/K37G/T60V/A79G/T83W/A96L/G162I/D174K/R195L/P210E/Y277V/E318Q | ++ | + | ++++ | + | + | |
| 1383/1384 | S16Y | H13P/A16Y/D17G/A26E/E31K/K37G/T60V/A79G/T83W/A96L/G162K/D174K/R195L/P210E/Y277V/E318Q | ++ | | ++++ | | | |
| 1385/1386 | K162S | H13P/A16S/D17G/A26E/E31K/K37G/T60V/A79G/T83W/A96L/G162S/D174K/R195L/P210E/Y277V/E318Q | ++ | | ++++ | + | + | ++ |
| 1387/1388 | L96C | H13P/A16S/D17G/A26E/E31K/K37G/T60V/A79G/T83W/A96C/G162K/D174K/R195L/P210E/Y277V/E318Q | +++ | ++ | ++++ | + | ++ | ++ |
| 1389/1390 | E210K | H13P/A16S/D17G/A26E/E31K/K37G/T60V/A79G/T83W/A96L/G162K/D174K/R195L/P210K/Y277V/E318Q | ++ | | +++ | | | |
| 1391/1392 | K174I | H13P/A16S/D17G/A26E/E31K/K37G/T60V/A79G/T83W/A96L/G162K/D174I/R195L/P210E/Y277V/E318Q | ++ | | ++++ | | | |
| 1393/1394 | E210L | H13P/A16S/D17G/A26E/E31K/K37G/T60V/A79G/T83W/A96L/G162K/D174K/R195L/P210L/Y277V/E318Q | ++ | | ++++ | | | |
| 1395/1396 | E26D | H13P/A16S/D17G/A26D/E31K/K37G/T60V/A79G/T83W/A96L/G162K/D174K/R195L/P210E/Y277V/E318Q | + | | ++++ | | | |
| 1397/1398 | E26N | H13P/A16S/D17G/A26N/E31K/K37G/T60V/A79G/T83W/A96L/G162K/D174K/R195L/P210E/Y277V/E318Q | ++ | | ++++ | | | |
| 1399/1400 | E210D | H13P/A16S/D17G/A26E/E31K/K37G/T60V/A79G/T83W/A96L/G162K/D174K/R195L/P210D/Y277V/E318Q | ++ | | ++++ | | | |
| 1401/1402 | P13F | H13F/A16S/D17G/A26E/E31K/K37G/T60V/A79G/T83W/A96L/G162K/D174K/R195L/P210E/Y277V/E318Q | ++ | | +++ | | | |
| 1403/1404 | Q318N | H13P/A16S/D17G/A26E/E31K/K37G/T60V/A79G/T83W/A96L/G162K/D174K/R195L/P210E/Y277V/E318N | ++ | | ++++ | | | |
| 1405/1406 | V277Y | H13P/A16S/D17G/A26E/E31K/K37G/T60V/A79G/T83W/A96L/G162K/D174K/R195L/P210E/E318Q | ++ | + | ++++ | + | + | |
| 1407/1408 | K174W | H13P/A16S/D17G/A26E/E31K/K37G/T60V/A79G/T83W/A96L/G162K/D174W/R195L/P210E/Y277V/E318Q | ++ | | ++++ | | | |
| 1409/1410 | K31H | H13P/A16S/D17G/A26E/E31H/K37G/T60V/A79G/T83W/A96L/G162K/D174K/R195L/P210E/Y277V/E318Q | ++ | + | ++++ | + | + | |
| 1411/1412 | K31D | H13P/A16S/D17G/A26E/E31D/K37G/T60V/A79G/T83W/A96L/G162K/D174K/R195L/P210E/Y277V/E318Q | ++ | + | ++++ | + | + | |
| 1413/1414 | G79N | H13P/A16S/D17G/A26E/E31K/K37G/T60V/A79N/T83W/A96L/G162K/D174K/R195L/P210E/Y277V/E318Q | | | | | | |
| 1415/1416 | G37K | H13P/A16S/D17G/A26E/E31K/T60V/A79G/T83W/A96L/G162K/D174K/R195L/P210E/Y277V/E318Q | ++ | | ++++ | | | |
| 1417/1418 | K31I | H13P/A16S/D17G/A26E/E311/K37G/T60V/A79G/T83W/A96L/G162K/D174K/R195L/P210E/Y277V/E318Q | ++ | | ++++ | | | |
| 1419/1420 | G37H | H13P/A16S/D17G/A26E/E31K/K37H/T60V/A79G/T83W/A96L/G162K/D174K/R195L/P210E/Y277V/E318Q | ++ | | +++ | | | |
| 1421/1422 | Q318C | H13P/A16S/D17G/A26E/E31K/K37G/T60V/A79G/T83W/A96L/G162K/D174K/R195L/P210E/Y277V/E318C | ++ | | ++++ | | | |
| 1423/1424 | K31F | H13P/A16S/D17G/A26E/E31F/K37G/T60V/A79G/T83W/A96L/G162K/D174K/R195L/P210E/Y277V/E318Q | ++ | | ++++ | | | |
| 1425/1426 | G79P | H13P/A16S/D17G/A26E/E31K/K37G/T60V/A79P/T83W/A96L/G162K/D174K/R195L/P210E/Y277V/E318Q | | | | | | |
| 1427/1428 | L195P | H13P/A16S/D17G/A26E/E31K/K37G/T60V/A79G/T83W/A96L/G162K/D174K/R195P/P210E/Y277V/E318Q | ++ | | ++++ | | | |
| 1429/1430 | Q318I | H13P/A16S/D17G/A26E/E31K/K37G/T60V/A79G/T83W/A96L/G162K/D174K/R195L/P210E/Y277V/E318I | ++ | | ++++ | | | |
| 1431/1432 | K162A | H13P/A16S/D17G/A26E/E31K/K37G/T60V/A79G/T83W/A96L/G162A/D174K/R195L/P210E/Y277V/E318Q | +++ | + | ++++ | + | + | ++ |
| 1433/1434 | V277Q | H13P/A16S/D17G/A26E/E31K/K37G/T60V/A79G/T83W/A96L/G162K/D174K/R195L/P210EIY277Q/E318Q | ++ | | ++++ | + | + | |
| 1435/1436 | E26F | H13P/A16S/D17G/A26F/E31K/K37G/T60V/A79G/T83W/A96L/G162K/D174K/R195L/P210E/Y277V/E318Q | | | | | | |
| 1437/1438 | V277C | H13P/A16S/D17G/A26E/E31K/K37G/T60V/A79G/T83W/A96L/G162K/D174K/R195L/P210EIY277C/E318Q | ++ | | ++++ | | + | |
| 1439/1440 | G79H | H13P/A16S/D17G/A26E/E31K/K37G/T60V/A79H/T83W/A96L/G162K/D174K/R195L/P210E/Y277V/E318Q | | | | | | |
| 1441/1442 | K31C | H13P/A16S/D17G/A26E/E31C/K37G/T60V/A79G/T83W/A96L/G162K/D174K/R195L/P210E/Y277V/E318Q | ++ | | ++++ | | | |
| 1443/1444 | G79I | H13P/A16S/D17G/A26E/E31K/K37G/T60V/A79I/T83W/A96L/G162K/D174K/R195L/P210E/Y277V/E318Q | | | | | | |
| 1445/1446 | G37I | H13P/A16S/D17G/A26E/E31K/K37I/T60V/A79G/T83W/A96L/G162K/D174K/R195L/P210E/Y277V/E318Q | | | +++ | | | |
| 1447/1448 | G17Q | H13P/A16S/D17Q/A26E/E31K/K37G/T60V/A79G/T83W/A96L/G162K/D174K/R195L/P210E/Y277V/E318Q | +++ | + | ++++ | ++ | ++ | |
| 1449/1450 | K31N | H13P/A16S/D17G/A26E/E31N/K37G/T60V/A79G/T83W/A96L/G162K/D174K/R195L/P210E/Y277V/E318Q | ++ | | ++++ | | + | |
| 1451/1452 | V277N | H13P/A16S/D17G/A26E/E31K/K37G/T60V/A79G/T83W/A96L/G162K/D174K/R195L/P210E/Y277N/E318Q | ++ | | ++++ | | | |
| 1453/1454 | G37D | H13P/A16S/D17G/A26E/E31K/K37D/T60V/A79G/T83W/A96L/G162K/D174K/R195L/P210E/Y277V/E318Q | ++ | | ++++ | | | |
| 1455/1456 | V277H | H13P/A16S/D17G/A26E/E31K/K37G/T60V/A79G/T83W/A96L/G162K/D174K/R195L/P210E/Y277H/E318Q | ++ | | ++++ | + | + | |
| 1457/1458 | V277D | H13P/A16S/D17G/A26E/E31K/K37G/T60V/A79G/T83W/A96L/G162K/D174K/R195L/P210E/Y277D/E318Q | + | | ++++ | | | |
| 1459/1460 | L96D | H13P/A16S/D17G/A26E/E31K/K37G/T60V/A79G/T83W/A96D/G162K/D174K/R195L/P210E/Y277V/E318Q | ++ | + | ++++ | + | + | ++ |
| 1461/1462 | K174C | H13P/A16S/D17G/A26E/E31K/K37G/T60V/A79G/T83W/A96L/G162K/D174C/R195L/P210E/Y277V/E318Q | ++ | | ++++ | | | |
| 1463/1464 | K162P | H13P/A16S/D17G/A26E/E31K/K37G/T60V/A79G/T83W/A96L/G162P/D174K/R195L/P210E/Y277V/E318Q | ++ | | ++++ | | + | |
| 1465/1466 | Q318F | H13P/A16S/D17G/A26E/E31K/K37G/T60V/A79G/T83W/A96L/G162K/D174K/R195L/P210E/Y277V/E318F | + | | ++++ | | | |
| 1467/1468 | W83N | H13P/A16S/D17G/A26E/E31K/K37G/T60V/A79G/T83N/A96L/G162K/D174K/R195L/P210E/Y277V/E318Q | +++ | + | ++++ | + | + | + |
| 1469/1470 | V60C | H13P/A16S/D17G/A26E/E31K/K37G/T60C/A79G/T83W/A96L/G162K/D174K/R195L/P210E/Y277V/E318Q | ++ | | ++++ | + | | |
| 1471/1472 | W83I | H13P/A16S/D17G/A26E/E31K/K37G/T60V/A79G/T83I/A96L/G162K/D174K/R195L/P210E/Y277V/E318Q | ++ | + | ++++ | + | + | + |
| 1473/1474 | K162M | H13P/A16S/D17G/A26E/E31K/K37G/T60V/A79G/T83W/A96L/G162M/D174K/R195L/P210E/Y277V/E318Q | +++ | | ++++ | + | + | ++ |
| 1475/1476 | E210H | H13P/A16S/D17G/A26E/E31K/K37G/T60V/A79G/T83W/A96L/G162K/D174K/R195L/P210H/Y277V/E318Q | ++ | | ++++ | | | |
| 1477/1478 | L195H | H13P/A16S/D17G/A26E/E31K/K37G/T60V/A79G/T83W/A96L/G162K/D174K/R195H/P210E/Y277V/E318Q | ++ | ++ | ++++ | + | ++ | |
| 1479/1480 | K174Y | H13P/A16S/D17G/A26E/E31K/K37G/T60V/A79G/T83W/A96L/G162K/D174Y/R195L/P210E/Y277V/E318Q | ++ | | ++++ | | | |
| 1481/1482 | G37Y | H13P/A16S/D17G/A26E/E31K/K37Y/T60V/A79G/T83W/A96L/G162K/D174K/R195L/P210E/Y277V/E318Q | + | | +++ | | | |
| 1483/1484 | E210Q | H13P/A16S/D17G/A26E/E31K/K37G/T60V/A79G/T83W/A96L/G162K/D174K/R195L/P210Q/Y277V/E318Q | ++ | + | ++++ | + | + | ++ |
| 1485/1486 | G37T | H13P/A16S/D17G/A26E/E31K/K37T/T60V/A79G/T83W/A96L/G162K/D174K/R195L/P210E/Y277V/E318Q | ++ | | +++ | | | |
| 1487/1488 | L96N | H13P/A16S/D17G/A26E/E31K/K37G/T60V/A79G/T83W/A96N/G162K/D174K/R195L/P210E/Y277V/E318Q | ++ | | ++++ | | | + |
| 1489/1490 | W83H | H13P/A16S/D17G/A26E/E31K/K37G/T60V/A79G/T83H/A96L/G162K/D174K/R195L/P210E/Y277V/E318Q | ++ | + | ++++ | + | + | + |
| 1491/1492 | S16H | H13P/A16H/D17G/A26E/E31K/K37G/T60V/A79G/T83W/A96L/G162K/D174K/R195L/P210E/Y277V/E318Q | ++ | | ++++ | | | |
| 1493/1494 | K174F | H13P/A16S/D17G/A26E/E31K/K37G/T60V/A79G/T83W/A96L/G162K/D174F/R195L/P210E/Y277V/E318Q | ++ | | ++++ | | | |
| 1495/1496 | W83D | H13P/A16S/D17G/A26E/E31K/K37G/T60V/A79G/T83D/A96L/G162K/D174K/R195L/P210E/Y277V/E318Q | ++ | + | ++++ | + | + | |
| 1497/1498 | W83Q | H13P/A16S/D17G/A26E/E31K/K37G/T60V/A79G/T83Q/A96L/G162K/D174K/R195L/P210E/Y277V/E318Q | +++ | + | ++++ | + | + | + |
| 1499/1500 | K162H | H13P/A16S/D17G/A26E/E31K/K37G/T60V/A79G/T83W/A96L/G162H/D174K/R195L/P210E/Y277V/E318Q | +++ | + | ++++ | ++ | + | + |
| 1501/1502 | K162W | H13P/A16S/D17G/A26E/E31K/K37G/T60V/A79G/T83W/A96L/G162W/D174K/R195L/P210E/Y277V/E318Q | ++ | | +++ | | | |
| 1503/1504 | K162N | H13P/A16S/D17G/A26E/E31K/K37G/T60V/A79G/T83W/A96L/G162N/D174K/R195L/P210E/Y277V/E318Q | ++ | + | ++++ | + | + | ++ |
| 1505/1506 | S16F | H13P/A16F/D17G/A26E/E31K/K37G/T60V/A79G/T83W/A96L/G162K/D174K/R195L/P210E/Y277V/E318Q | + | | ++++ | | | |
| 1507/1508 | K162Q | H13P/A16S/D17G/A26E/E31K/K37G/T60V/A79G/T83W/A96L/G162Q/D174K/R195L/P210E/Y277V/E318Q | +++ | + | ++++ | + | + | ++ |
| 1509/1510 | K162G | H13P/A16S/D17G/A26E/E31K/K37G/T60V/A79G/T83W/A96L/D174K/R195L/P210E/Y277V/E318Q | ++ | | ++++ | + | + | + |
| 1511/1512 | K162R | H13P/A16S/D17G/A26E/E31K/K37G/T60V/A79G/T83W/A96L/G162R/D174K/R195L/P210E/Y277V/E318Q | +++ | + | ++++ | + | + | + |
| 1513/1514 | E210F | H13P/A16S/D17G/A26E/E31K/K37G/T60V/A79G/T83W/A96L/G162K/D174K/R195L/P210F/Y277V/E318Q | + | | ++++ | | | |
| 1515/1516 | K162C | H13P/A16S/D17G/A26E/E31K/K37G/T60V/A79G/T83W/A96L/G162C/D174K/R195L/P210E/Y277V/E318Q | +++ | + | ++++ | ++ | + | ++ |

Activities were determined relative to either the reference polypeptide of SEQ ID NO: 4 or SEQ ID NO: 906. Levels of increased activity are defined as follows: “+” 0.9 to 1.1, “++” > 1.1, “+++” > 2.0,“++++”>3.5

TABLE 5-2

Oxalate decarboxylase activity Relative to SEQ ID NO: 4 or SEQ ID NO: 906

| SEQ ID NO: (nt/aa) | Amino Acid Differences (Relative to SEQ ID NO: 906) | Amino Acid Differences (Relative to SEQ ID NO: 2) | FIOP Unchallenged Activity at pH 2.8 relative to SEQ ID NO: 2 | FIOP Unchallenged Activity at pH 4.5 relative to SEQ ID NO: 2 | FIOP 0.3 g/L Pepsin Challenge relative to SEQ ID NO: 2 | FIOP Unchallenged Activity at pH 4.5 relative to SEQ ID NO: 906 | FIOP Unchallenged Activity at pH 2.8 relative to SEQ ID NO: 906 | FIOP 0.8 g/L Pepsin Challenge relative to SEQ ID NO: 906 |
|---|---|---|---|---|---|---|---|---|
| 905/906 | | H13P/A16S/D17G/A26E/E31K/K37G/T60V/A79G/T83W/A96L/G162K/D 174K/R195L/P210E/Y277V/E318Q | ++ | | +++ | + | + | + |
| ½ | P13H/S16A/G17D/E26A/K31E/G37K/V60T/G79A/W83T/L96A/K162G/K174 D/L195R/E210P/V277Y/Q318E | | + | + | + | | ++ | |
| 1517/1518 | K174D/Q318E | H13P/A16S/D17G/A26E/E31K/K37G/T60V/A79G/T83W/A96L/G162K/R 195L/P210E/Y277V | +++ | ++ | ++++ | ++ | ++ | ++ |
| 1519/1520 | E26A/L96A | H13P/A16S/D17G/E31K/K37G/T60V/A79G/T83W/G162K/D174K/R195L/P210E/Y277V/E318Q | ++ | + | +++ | | ++ | + |
| 1521/1522 | V60T/Q318E | H13P/A16S/D17G/A26E/E31K/K37G/A79G/T83W/A96L/G162K/D174K/R195L/P210E/Y277V | +++ | + | +++ | ++ | ++ | |
| 1523/1524 | K31E/Q318E | H13P/A16S/D17G/A26E/K37G/T60V/A79G/T83W/A96L/G162K/D174K/R195L/P210E/Y277V | +++ | + | +++ | ++ | ++ | |
| 1525/1526 | K162G/K174D/Q318E | H13P/A16S/D17G/A26E/E31K/K37G/T60V/A79G/T83W/A96L/R195L/P 210E/Y277V | +++ | + | +++ | ++ | ++ | ++ |
| 1527/1528 | K174D/V277Y/Q318E | H13P/A16S/D17G/A26E/E31K/K37G/T60V/A79G/T83W/A96L/G162K/R 195L/P210E | +++ | + | +++ | ++ | ++ | ++ |
| 1529/1530 | E26A/L195R/Q318 E | H13P/A16S/D17G/E31K/K37G/T60V/A79G/T83W/A96L/G162K/D174K/P210E/Y277V | ++ | | +++ | + | + | + |
| 1531/1532 | V60T/K162G/L195 R | H13P/A16S/D17G/A26E/E31K/K37G/A79G/T83W/A96L/D174K/P210E/Y277V/E318Q | +++ | + | +++ | ++ | ++ | |
| 1533/1534 | V60T/K162G/Q318E | H13P/A16S/D17G/A26E/E31K/K37G/A79G/T83W/A96L1D174K/R195L1 P210E/Y277V | +++ | + | +++ | ++ | + | |
| 1535/1536 | K174D/L195R/V277Y | H13P/A16S/D17G/A26E/E31K/K37G/T60V/A79G/T83W/A96L/G162K/P 210E/E318Q | ++ | + | +++ | ++ | ++ | |
| 1537/1538 | S16A/G17D/K174D | H13P/A26E/E31K/K37G/T60V/A79G/T83W/A96L/G162K/R195L/P210E/Y277V/E318Q | ++ | + | ++++ | + | + | |
| 1539/1540 | V60T/L195R/V277Y | H13P/A16S/D17G/A26E/E31K/K37G/A79G/T83W/A96L/G162K/D174K/P210E/E318Q | ++ | + | +++ | + | + | |
| 1541/1542 | G37K/V277Y/Q318E | H13P/A16S/D17G/A26E/E31K/T60V/A79G/T83W/A96L/G162K/D174K/R195L/P210E | ++ | + | ++++ | | + | |
| 1543/1544 | S16A/K162G/L195 R/V277Y | H13P/D17G/A26E/E31K/K37G/T60V/A79G/T83W/A96L/D174K/P210E/E318Q | ++ | | +++ | + | + | |
| 1545/1546 | E26A/G79A/W83T/K162G | H13P/A16S/D17G/E31K/K37G/T60V/A96L/D174K/R195L/P210E/Y277V/E318Q | ++ | | ++++ | | | |
| 1547/1548 | E26A/K31E/V60T/Q318E | H13P/A16S/D17G/K37G/A79G/T83W/A96L/G162K/D174K/R195L/P210 E/Y277V | +++ | ++ | ++++ | ++ | ++ | |
| 1549/1550 | S16A/K174D/L195 R/V277Y | H13P/D17G/A26E/E31K/K37G/T60V/A79G/T83W/A96L/G162K/P210E/E318Q | ++ | + | ++++ | + | + | |
| 1551/1552 | P13H/G37K/W83T/K162G | A16S/D17G/A26E/E31K/T60V/A79G/A96L/D174K/R195L/P210E/Y277V/E318Q | ++ | + | ++++ | + | + | |
| 1553/1554 | S16A/G17D/V60T/L195R | H13P/A26E/E31K/K37G/A79G/T83W/A96L/G162K/D174K/P210E/Y277V/E318Q | +++ | + | +++ | ++ | + | |
| 1555/1556 | P13H/G17D/G37K/W83T | A16S/A26E/E31K/T60V/A79G/A96L/G162K/D174K/R195L/P210E/Y277 V/E318Q | ++ | + | +++ | | + | |
| 1557/1558 | K31E/G37K/K162G/K174D/Q318E | H13P/A16S/D17G/A26E/T60V/A79G/T83W/A96L/R195L/P210E/Y277V | +++ | + | +++ | ++ | ++ | |
| 1559/1560 | P13H/S16A/K31E/W83T/K162G | D17G/A26E/K37G/T60V/A79G/A96L/D174K/R195L/P210E/Y277V/E318 Q | +++ | ++ | ++++ | + | ++ | |
| 1561/1562 | S16A/V60T/K174D/L195R/Q318E | H13P/D17G/A26E/E31K/K37G/A79G/T83W/A96L/G162K/P210E/Y277V | +++ | + | +++ | + | + | |
| 1563/1564 | G17D/V60T/L96A/K162G/L195R/V27 7Y | H13P/A16S/A26E/E31K/K37G/A79G/T83W/D174K/P210E/E318Q | +++ | + | +++ | + | ++ | |
| 1565/1566 | P13H/E26A/V60T/W83T/K162G/K174D | A16S/D17G/E31K/K37G/A79G/A96L/R195L/P210E/Y277V/E318Q | +++ | ++ | +++ | ++ | ++ | |
| 1567/1568 | G17D/K31E/V60T/K162G/K174D/V277Y | H13P/A16S/A26E/K37G/A79G/T83W/A96L/R195L/P210E/E318Q | +++ | ++ | +++ | ++ | ++ | |
| 1569/1570 | S16A/G17D/E26A/W83T/L96A/V277Y | H13P/E31K/K37G/T60V/A79G/G162K/D174K/R195L/P210E/E318Q | ++ | ++ | ++++ | | ++ | |
| 1571/1572 | G17D/E26A/G37K/K174D/V277Y/Q318E | H13P/A16S/E31K/T60V/A79G/T83W/A96L/G162K/R195L/P210E | ++ | + | ++++ | | ++ | |
| 1573/1574 | P13H/S16A/K31E/V60T/K162G/K174 D | D17G/A26E/K37G/A79G/T83W/A96L/R195L/P210E/Y277V/E318Q | ++ | + | ++++ | + | ++ | |
| 1575/1576 | P13H/G17D/K31E/W83T/V277Y/Q318E | A16S/A26E/K37G/T60V/AT9G/A96L/G162K/D174K/R195L/P210E | ++ | + | +++ | | ++ | |
| 1577/1578 | P13H/S16A/G17D/K31E/W83T/K162 G/Q318E | A26E/K37G/T60V/A79G/A96L/D174K/R195L/P210E/Y277V | ++ | ++ | ++++ | + | ++ | |
| 1579/1580 | P13H/S16A/V60T/W83T/K162G/L195R/Q318E | D17G/A26E/E31K/K37G/A79G/A96L/D174K/P210E/Y277V | ++ | ++ | ++++ | | ++ | |
| 1581/1582 | P13H/S16A/G17D/K31E/G37K/W83T/L96A/K162G | A26E/T60V/A79G/D174K/R195L/P210E/Y277V/E318Q | ++ | + | +++ | | ++ | |
| 1583/1584 | P13H/G17D/E26A/G37K/V60T/W83T/K162G/E210P/Q318E | A16S/E31K/A79G/A96L/D174K/R195L/Y277V | ++ | | ++++ | | + | ++++ |
| 1585/1586 | P13H/S16A/E26A/G37K/W83T/K162 G/K174D/L195R/Q 318E | D17G/E31K/T60V/A79G/A96L/P210E/Y277V | +++ | + | +++ | ++ | ++ | |
| 1587/1588 | P13H/S16A/E26A/K31E/W83T/L96A/K162G/K174D/Q31 8E | D17G/K37G/T60V/A79G/R195L/P210E/Y277V | ++ | ++ | +++ | + | ++ | |
| 1589/1590 | P13H/S16A/G17D/K31E/V60T/W83T/L96A/K162G/K174 D/L195R/Q318E | A26E/K37G/A79G/P210E/Y277V | +++ | ++ | +++ | + | ++ | |
| 1591/1592 | P13H/S16A/E26A/ G37K/V60T/W83T/K162G/K174D/L19 5R/E210P/Q318E | D17G/E31K/A79G/A96L/Y277V | ++ | + | ++++ | + | ++ | |
| 1593/1594 | P13H/S16A/G37K/G79A/W83T/L96A/K162G/K174D/L19 5R/E210P/V277Y | D17G/A26E/E31K/T60V/E318Q | ++ | | ++++ | | + | |
| 1595/1596 | P13H/G17D/E26A/K31E/G37K/V60T/G79A/W83T/L96A/K162G/K174D/E210P | A16S/R195L/Y277V/E318Q | ++ | | ++++ | | + | |
| 1597/1598 | P13H/S16A/G17D/E26A/G37K/G79A/W83T/L96A/K174 D/L195R/E210D/Q 318E | E31K/T60V/G162K/P210D/Y277V | ++ | | ++++ | | + | |
| 1599/1600 | P13H/E26A/K31E/G37K/V60T/W83T/L96A/K162G/K174 D/L195R/E210P/V277Y/Q318E | A16S/D17G/A79G | ++ | + | ++++ | | ++ | |
| 1601/1602 | P13H/S16A/G17D/K31E/G37K/V60T/G79A/W83T/L96A/K162G/K174D/L19 5R/E210P/Q318E | A26E/Y277V | ++ | + | +++ | | ++ | |
| 1603/1604 | P13H/S16A/G17D/K31E/V60T/G79A/W83T/L96A/K162 G/K174D/L195R/E 210P/V277Y/Q318 E | A26E/K37G | + | + | +++ | | ++ | |
| 1605/1606 | P13H/S16A/G17D/E26A/G37K/V60T/G79A/L96A/K162G/K174D/L195R/E210P/V277Y/Q318E | E31K/T83W | | | ++ | | | |
| 1607/1608 | P13H/E26A/K31E/G37K/V60T/G79A/W83T/L96A/K162 G/K174D/L195R/E 210P/V277Y/Q318 E | A16S/D17G | ++ | | +++ | | + | |
| 1609/1610 | P13H/S16A/G17D/E26A/K31E/G37K/V60T/L96A/K162G /K174D/L195R/E210P/V277Y/Q318E | A79G/T83W | + | + | ++ | | ++ | |
| 1611/1612 | P13H/S16A/G17D/E26A/K31E/G37K/G79A/W83T/L96A/K162G/K174D/L19 5R/E210P/Q318E | T60V/Y277V | ++ | + | +++ | | ++ | |
| 1613/1614 | P13H/S16A/G17D/E26A/K31E/G37K/V60T/G79A/L96A/K162G/K174D/E210P/V277Y/Q318E | T83W/R195L | | | ++ | | | |
| 1615/1616 | P13H/G17D/E26A/K31E/G37K/V60T/G79A/W83T/L96A/K162G/K174D/L19 5R/E210P/V277Y/Q318E | A16S | ++ | + | +++ | | + | |
| 1617/1618 | P13H/S16A/E26A/ K31E/G37K/V60T/ G79A/W83T/L96A/ K162G/K174D/L19 5R/E210P/V277Y/Q318E | D17G | ++ | + | +++ | | ++ | |
| 1619/1620 | S16A/G17D/E26A/ K31E/G37K/V60T/ G79A/W83T/L96A/ K162G/K174D/L19 5R/E210P/V277Y/Q318E | H13P | ++ | | +++ | | | |
| 1621/1622 | P13H/S16A/G17D/ E26A/K31E/G37K/ V60T/G79A/W83T/ L96A/K162G/K174 D/L195R/E210P/V277H/Q318E | Y277H | ++ | ++ | +++ | | ++ | |

Activities were determined relative to either the reference polypeptide of SEQ ID NO: 4 or SEQ ID NO: 906. Levels of increased activity are defined as follows: “+” 0.9 to 1.1, “++” > 1.1, “+++” > 2.0,“++++”>3.5

### Example 12

### In Vivo Dose Response in an Enteric Hyperoxaluria Mini Pig Model With Oral Treatment

### Preparation of Engineered Oxalate Decarboxylase

[0397] The expression construct for SEQ ID NO: 905 was fermented at high cell density in a fed-batch format. The fermentation process consisted of an inoculum preparation phase and three main fermentation phases: batch, fed-batch growth, and fed-batch expression. Cells were harvested by bucket centrifugation, and the pellets were stored at -80° C. until further use.

[0398] Cell pellets were thawed, resuspended, and lysed by a homogenizer. The whole cell lysate was clarified by flocculation followed by centrifugation. The clarified lysate was concentrated and underwent an acid precipitation step to remove whole cell proteins. Upon centrifugation, the target enzyme in the clarified lysate was purified by cation exchange chromatography using a Tosoh GigaCap S 650 M column. The column eluate was concentrated, and buffer exchanged into processing buffer (25 mM Tris, 150 mM NaCl, pH 8.0) by tangential flow filtration against a 100 kDa PES membrane (Repligen). The buffer exchanged protein was then batch sterile filtered through a 0.2 µm PES filter (Sartorius Sartopore 2 XLG) and lyophilized to obtain a dried yellow powder.

### In Vivo Studies

[0399] A validated model of enteric hyperoxaluria (HyOx) was produced in naive Gottingen minipigs (n=36 females, 15 kg average body weight, aged 7-8 months) and carried forward into in vivo studies. The study objective was to evaluate the ability of an orally administered engineered oxalate decarboxylase (OxDC) enzyme (SEQ ID NO: 906) to break down dietary oxalate in the GI tract, primarily the stomach, thereby lowering urine oxalate levels (UOx).

[0400] On days 0-6, all animals were fed a low oxalate diet (LOD: Research Diets Product D22071205 (0 g sodium oxalate/ kg feed)) to establish a baseline. Animals were then switched to a high oxalate diet during days 7-20 (HOD: Research Diets Product D22071206 (1.52 g sodium oxalate/ kg feed)) to simulate a disease state. On days 14-20, treatment (SEQ ID NO: 906) was admixed into HOD immediately prior to feeding. Animals were fed a set meal ration twice daily (AM and PM), approximately 8 hours apart, throughout the study. Animals were dosed with either 5,139 Units, 10,122 Units or 41,029 Units per meal, dependent upon group assignment. One unit of the engineered oxalate decarboxylase (SEQ ID NO: 906) is defined as the amount of engineered oxalate decarboxylase polypeptide which catalyzes the substrate and generates 1.0 µmol of formate per minute at 25° C. The unit of specific activity of SEQ ID NO: 906 is U/mg which is equivalent to µmol/min/mg.

[0401] Urine was collected for a total of 24 hours on each collection day, (days 5, 6, 12, 13, 19 and 20) for a total of 6 collections per animal. During urine collection, animals were single housed, and all urine excreted in a 24 hour period was collected into individual vessels. Urine volume was recorded, and aliquots were frozen at -70° C. for later UOx analysis using the oxalate analysis kit from Trinity BioSciences (591D-1KT).

[0402] Urine samples were prepared according to the kit directions (Trinity Biosciences, 591D-1KT), employing a minor modification to scale volumes for a plate reader in place of a cuvette. Data analysis was carried out using GraphPad Prism 9 (GraphPad Software, San Diego, CA). Individual UOx values (normalized as mg oxalate/24 hours) as well as percent change in UOx were examined.

[0403] To evaluate efficacy of SEQ ID NO: 906 on urine oxalate, a minimum threshold reduction of 20% in UOx from HOD to HOD + Treatment was set. This threshold value is a relevant endpoint for models of Hyperoxaluria because this reduction is believed to reduce the number of future kidney stone occurrences. The response to treatment appears to be dose dependent, as 6 of 6 individual animals responded with a 20% or greater reduction in UOx in the high dose group (FIG. 1). A reduction in UOx with treatment was observed in all groups, however this reduction was statistically significant in the highest dose group only (FIG. 2). In groups that received vehicle (PBS) during the treatment phase, there was no difference between HOD and HOD + Treatment.

What is claimed is:

1. An engineered oxalate decarboxylase polypeptide comprising an amino acid sequence having at least 70%, 75%, 80%, 81%, 82%, 83%, 84%, 85%, 86%, 87%, 88%, 89%, 90%, 91%, 92%, 93%, 94%, 95%, 96%, 97%, 98%, 99%, or more sequence identity to a reference sequence corresponding to SEQ ID NO: 2, 4, 172, 320, 396, 616, 670, 750, or 906, or to a reference sequence corresponding to residues 1-359 of SEQ ID NO: 172, 320, or 396, wherein the amino acid sequence comprises one or more amino acid substitutions relative to the reference sequence corresponding to SEQ ID NO: 2, 4, 172, 320, 396, 616, 670, 750, or 906, or relative to the reference sequence corresponding to residues 1-359 of SEQ ID NO: 172, 320, or 396.

2. The engineered oxalate decarboxylase polypeptide of claim 1, comprising an amino acid sequence having at least 70%, 75%, 80%, 81%, 82%, 83%, 84%, 85%, 86%, 87%, 88%, 89%, 90%, 91%, 92%, 93%, 94%, 95%, 96%, 97%, 98%, 99%, or more sequence identity to the reference sequence corresponding to SEQ ID NO: 2 or 4, wherein the amino acid sequence comprises one or more amino acid substitutions relative to the reference sequence corresponding to SEQ ID NO: 2 or 4.

3. The engineered oxalate decarboxylase polypeptide of claim 1, comprising an amino acid sequence having at least 70%, 75%, 80%, 81%, 82%, 83%, 84%, 85%, 86%, 87%, 88%, 89%, 90%, 91%, 92%, 93%, 94%, 95%, 96%, 97%, 98%, 99%, or more sequence identity to the reference sequence corresponding to SEQ ID NO: 172, 320, 396, 616, 670, 750, or 906, or to the reference sequence corresponding to residues 1-359 of SEQ ID NO: 172, 320, or 396, wherein the amino acid sequence comprises one or more amino acid substitutions relative to the reference sequence of SEQ ID NO: 2 or 4.

4. The engineered oxalate decarboxylase polypeptide of claim 1, comprising an amino acid sequence having at least 70%, 75%, 80%, 81%, 82%, 83%, 84%, 85%, 86%, 87%, 88%, 89%, 90%, 91%, 92%, 93%, 94%, 95%, 96%, 97%, 98%, 99%, or more sequence identity to the reference sequence corresponding to an even-numbered SEQ ID NO. of SEQ ID NOs: 28-1622, or to a reference sequence corresponding to residues 1-359 of an even-numbered SEQ ID NO. of SEQ ID NOs: 28-614, wherein the amino acid sequence comprises one or more amino acid substitutions relative to the reference sequence of SEQ ID NO: 2 or 4.

5. The engineered oxalate decarboxylase polypeptide of any one of claims 1-4, wherein the amino acid sequence of the engineered oxalate decarboxylase polypeptide comprises at least a substitution at amino acid position 4, 5, 6, 7, 10, 11, 13, 14, 16, 17, 18, 19, 22, 26, 31, 33, 35, 37, 40, 43, 44, 46, 52, 54, 60, 61, 62, 63, 76, 79, 80, 82, 83, 85, 94, 96, 97, 103, 104, 106, 110, 117, 121, 123, 124, 125, 126, 128, 141, 149, 153, 155, 156, 160, 162, 164, 166, 169, 173, 174, 176, 180, 182, 183, 186, 187, 188, 189, 190, 193, 195, 196, 197, 199, 200, 205, 206, 208, 210, 212, 216, 219, 226, 227, 232, 233, 234, 240, 242, 243, 263, 265, 266, 267, 269, 270, 273, 274, 277, 284, 297, 301, 303, 304, 314, 316, 318, 331, 335, 339, 342, 343, 346, 347, 350, 351, 356, or 359, or combinations thereof, wherein the amino acid positions are relative to the reference sequence corresponding to SEQ ID NO: 2 or 4.

6. The engineered oxalate decarboxylase polypeptide of any one of claims 1-5, wherein the amino acid sequence of the engineered oxalate decarboxylase polypeptide comprises at least a substitution 4C/R/S, 5C/S, 6A/S/W, 7G, 10A/Q/R, 11R, 13A/C/D/E/F/G/I/K/L/M/N/P/Q/R/S/T/V/W/Y, 14L, 16C/D/E/F/G/H/I/K/L/M/N/P/Q/R/S/T/V/W/Y, 17A/C/D/E/F/G/I/K/L/M/N/P/Q/R/S/T/V/W/Y, 18G/Q/R, 19C, 22R, 26C/D/E/F/G/H/I/K/L/M/N/P/Q/R/S/T/V/W/Y, 31A/C/D/F/G/H/I/K/L/M/N/P/Q/R/S/T/V/W/Y, 33R, 35V, 37A/C/D/E/F/G/H/I/L/M/N/P/Q/R/S/T/V/W/Y, 40S, 43C, 44S, 46R, 52T, 54L, 60A/C/D/E/F/G/H/I/K/L/M/N/P/Q/R/S/V/W/Y, 61M, 62G, 63A/S, 76S, 79C/D/E/F/G/H/I/K/L/M/N/P/Q/R/S/T/V/W/Y, 80L, 82I, 83A/C/D/E/F/G/H/I/K/L/M/N/P/Q/R/S/V/W/Y, 85E/G/R, 94N/T, 96C/D/E/F/G/H/I/K/L/M/N/P/Q/R/S/T/V/W/Y, 97T, 103Q/S/V, 104Q, 106C, 110V, 117A, 121W, 123G/Q/S, 124A/C/G/Q/R/T, 125E/F/S, 126T, 128A, 141Q, 149T, 153H/Q/S, 155L/P/R/V, 156E, 160T, 162A/C/D/E/F/H/I/K/L/M/N/P/Q/R/S/T/V/W/Y, 164R/V, 166R, 169A/G/L, 173Q/V, 174A/C/E/F/G/H/I/K/L/M/N/P/Q/R/S/T/V/W/Y, 176L, 180E, 182R, 183C/E/I/K, 186N, 187L/R/S, 188A, 189R, 190G/Q, 193A/G, 195A/C/D/E/F/G/H/I/K/L/M/N/P/Q/S/T/V/W/Y, 196F/M/R/S/V, 197E, 199G/V, 200N, 205A, 206M, 208G, 210A/C/D/E/F/G/H/I/K/L/M/N/Q/R/S/T/V/W/Y, 212A/F/G/L/S/V, 216S/W, 219V, 226S, 227E/S, 232T, 233D/H/R, 234L, 240E, 242D, 243V, 263S, 265C, 266V, 267R, 269S, 270L, 273A, 274Q/S, 277A/C/D/E/F/G/H/I/K/L/M/N/P/Q/R/S/T/V/W, 284A/R/S, 297Y, 301I/Q/T, 303T, 304D/G, 314S, 316K/V, 318A/C/D/F/G/H/I/K/L/M/N/P/Q/R/S/T/V/W/Y, 331I/L/P/V, 335R, 339G, 342A/E/P/R, 343R/W, 346G/L/Q/W, 347F/R, 350R, 351A/E/H, 356S, or 359L/W, or combinations thereof, wherein the amino acid positions are relative to the reference sequence corresponding to SEQ ID NO: 2 or 4.

7. The engineered oxalate decarboxylase polypeptide of any one of claims 1-5, wherein the amino acid sequence of the engineered oxalate decarboxylase polypeptide comprises at least a substitution at amino acid position 13, 14, 16, 17, 26, 31, 37, 60, 79, 83, 96, 162, 174, 195, 196, 210, 226, 277, 301, or 318, or combinations thereof, wherein the amino acid positions are relative to the reference sequence corresponding to SEQ ID NO: 2 or 4.

8. The engineered oxalate decarboxylase polypeptide of claim 7, wherein the amino acid sequence of the engineered oxalate decarboxylase polypeptide comprises at least a substitution 13A/C/D/E/F/G/I/K/L/M/N/P/Q/R/S/T/V/W/Y, 14L, 16C/D/E/F/G/H/I/K/L/M/N/P/Q/R/S/T/V/W/Y, 17A/C/D/E/F/G/I/K/L/M/N/P/Q/R/S/T/V/W/Y, 26C/D/E/F/G/H/I/K/L/M/N/P/Q/R/S/T/V/W/Y, 31A/C/D/F/G/H/I/K/L/M/N/P/Q/R/S/T/V/W/Y, 37A/C/D/E/F/G/H/I/L/M/N/P/Q/R/S/T/V/W/Y, 60A/C/D/E/F/G/H/I/K/L/M/N/P/Q/R/S/V/W/Y, 79C/D/E/F/G/H/I/K/L/M/N/P/Q/R/S/T/V/W/Y, 83A/C/D/E/F/G/H/I/K/L/M/N/P/Q/R/S/V/W/Y, 96C/D/E/F/G/H/I/K/L/M/N/P/Q/R/S/T/V/W/Y, 162A/C/D/E/F/H/I/K/L/M/N/P/Q/R/S/T/V/W/Y, 174A/C/E/F/G/H/I/K/L/M/N/P/Q/R/S/T/V/W/Y, 195A/C/D/E/F/G/H/I/K/L/M/N/P/Q/S/T/V/W/Y, 196F/M/R/S/V, 210A/C/D/E/F/G/H/I/K/L/M/N/Q/R/S/T/V/W/Y, 226S, 277A/C/D/E/F/G/H/I/K/L/M/N/P/Q/R/S/T/V/W, 301I/Q/T, or 318A/C/D/F/G/H/I/K/L/M/N/P/Q/R/S/T/V/W/Y, or combinations thereof, wherein the amino acid positions are relative to the reference sequence corresponding to SEQ ID NO: 2 or 4.

9. The engineered oxalate decarboxylase polypeptide of claim 7, wherein the amino acid sequence of the engineered oxalate decarboxylase polypeptide comprises at least a substitution 13P, 14L, 16S, 17H/G, 26E, 31K, 37G, 60V, 79G, 83W, 96L, 162K, 174K, 195L, 196V, 210A/E, 226S, 277V, 301I, or 318Q, or combinations thereof, wherein the amino acid positions are relative to the reference sequence corresponding to SEQ ID NO: 2 or 4.

10. The engineered oxalate decarboxylase polypeptide of any one of claims 1-5, wherein the amino acid sequence comprises at least a substitution or substitution set at amino acid position(s) 346, 124, 359, 174, 173, 123, 196, 304, 301, 347, 11, 284, 210, 169, 216, 195, 339, 4, 6, 180, 80, 243, 182, 7, 226, 156, 183, 227, 219, 62, 343, 16/26, 16/26/242, 16/26/183/232, 155/206/242, 16/26/339, 16/26/155/206/339, 26, 26/206/339, 31/82/210, 31/82, 31/356, 31/97/226, 31/240/270, 31/82/226, 31/240, 31, 31/210/318, or 31/210, wherein the amino acid positions are relative to the reference sequence corresponding to SEQ ID NO: 2 or 4.

11. The engineered oxalate decarboxylase polypeptide of claim 1, wherein the amino acid sequence of the engineered oxalate decarboxylase polypeptide comprises at least a substitution or substitution set of an engineered oxalate decarboxylase polypeptide set forth in Tables 4-1, 4-2, 4-3, 4-4, 4-5, 4-6, 4-7, 5-1, and 5-2, wherein the amino acid positions are relative to SEQ ID NO: 2 or 4.

12. The engineered oxalate decarboxylase polypeptide of claim 1, comprising an amino acid sequence having at least 70%, 75%, 80%, 81%, 82%, 83%, 84%, 85%, 86%, 87%, 88%, 89%, 90%, 91%, 92%, 93%, 94%, 95%, 96%, 97%, 98%, 99%, or more sequence identity to a reference sequence corresponding to SEQ ID NO: 172, 320, 396, 616, 670, 750, or 906, or to a reference sequence corresponding to residues 1-359 of SEQ ID NO: 172, 320, or 396.

13. The engineered oxalate decarboxylase polypeptide of claim 1, comprising an amino acid sequence having at least 70%, 75%, 80%, 81%, 82%, 83%, 84%, 85%, 86%, 87%, 88%, 89%, 90%, 91%, 92%, 93%, 94%, 95%, 96%, 97%, 98%, 99%, or more sequence identity to the reference sequence corresponding to residues 1-359 of an even-numbered SEQ ID NO. of SEQ ID NOs: 28-614, a reference sequence corresponding to an even-numbered SEQ ID NO. of SEQ ID NOs: 28-614, or a reference sequence corresponding to an even-numbered SEQ ID NO. of SEQ ID NOs: 616-1622.

14. The engineered oxalate decarboxylase polypeptide of claim 1, comprising an amino sequence having at least 70%, 75%, 80%, 81%, 82%, 83%, 84%, 85%, 86%, 87%, 88%, 89%, 90%, 91%, 92%, 93%, 94%, 95%, 96%, 97%, 98%, 99%, or more sequence identity to the reference sequence corresponding to an even-numbered SEQ ID NO. of SEQ ID NOs: 28-1622, or to the reference sequence corresponding to residues 1-359 of an even-numbered SEQ ID NO. of SEQ ID NOs: 28-614, wherein the amino acid sequence comprises one or more substitutions relative to the reference sequence corresponding to SEQ ID NO: 172, 320, 396, 616, 670, 750, or 906, or relative to the reference sequence corresponding to residues 1-359 of SEQ ID NO: 172, 320, or 396.

15. The engineered oxalate decarboxylase polypeptide of claim 1, comprising an amino acid sequence having at least 70%, 75%, 80%, 81%, 82%, 83%, 84%, 85%, 86%, 87%, 88%, 89%, 90%, 91%, 92%, 93%, 94%, 95%, 96%, 97%, 98%, 99%, or more sequence identity to a reference sequence corresponding to SEQ ID NO: 172, 320, 396, 616, 670, 750, or 906, or to a reference sequence corresponding to residues 1-359 of SEQ ID NO: 172, 320, or 396, wherein the amino acid sequence comprises one or more substitutions relative to the reference sequence corresponding to SEQ ID NO: 172, 320, 396, 616, 670, 750, or 906, or relative to the reference sequence corresponding to residues 1-359 of SEQ ID NO: 172, 320, or 396.

16. The engineered oxalate decarboxylase polypeptide of claim 14 or 15, wherein the amino acid sequence of the engineered oxalate decarboxylase polypeptide comprises at least a substitution at amino acid position 4, 5, 6, 7, 10, 11, 13, 14, 16, 17, 18, 19, 22, 26, 31, 33, 35, 37, 40, 43, 44, 46, 52, 54, 60, 61, 62, 63, 76, 79, 80, 82, 83, 85, 94, 96, 97, 103, 104, 106, 110, 117, 121, 123, 124, 125, 126, 128, 141, 149, 153, 155, 156, 160, 162, 164, 166, 169, 173, 174, 176, 180, 182, 183, 186, 187, 188, 189, 190, 193, 195, 196, 197, 199, 200, 205, 206, 208, 210, 212, 216, 219, 226, 227, 232, 233, 234, 240, 242, 243, 263, 265, 266, 267, 269, 270, 273, 274, 277, 284, 297, 301, 303, 304, 314, 316, 318, 331, 335, 339, 342, 343, 346, 347, 350, 351, 356, or 359, or combinations thereof, wherein the amino acid positions are relative to the reference sequence corresponding to residues SEQ ID NO: 172, 320, 396, 616, 670, 750, or 906, or relative to the reference sequence corresponding to residues 1-359 of SEQ ID NO: 172, 320, or 396.

17. The engineered oxalate decarboxylase polypeptide of any one of claims 14-16, wherein the amino acid sequence of the engineered oxalate decarboxylase polypeptide comprises at least a substitution or amino acid residue 4C/R/S, 5C/S, 6A/S/W, 7G, 10A/Q/R, 11R, 13A/C/D/E/F/G/H/I/K/L/M/N/P/Q/R/S/T/V/W/Y, 14L/V, 16A/C/D/E/F/G/H/I/K/L/M/N/P/Q/R/S/T/V/W/Y, 17A/C/D/E/F/G/H/I/K/L/M/N/P/Q/R/S/T/V/W/Y, 18G/Q/R, 19C, 22R, 26A/C/D/E/F/G/H/I/K/L/M/N/P/Q/R/S/T/V/W/Y, 31A/C/D/E/F/G/H/I/K/L/M/N/P/Q/R/S/T/V/W/Y, 33R, 35V, 37A/C/D/E/F/G/H/I/K/L/M/N/P/Q/R/S/T/V/W/Y, 40S, 43C, 44S, 46R, 52T, 54L, 60A/C/D/E/F/G/H/I/K/L/M/N/P/Q/R/S/T/V/W/Y, 61M, 62G, 63A/S, 76S, 79A/C/D/E/F/G/H/I/K/L/M/N/P/Q/R/S/T/V/W/Y, 80L, 82I, 83A/C/D/E/F/G/H/I/K/L/M/N/P/Q/R/S/T/V/W/Y, 85E/G/R, 94N/T, 96A/C/D/E/F/G/H/I/K/L/M/N/P/Q/R/S/T/V/W/Y, 97T, 103Q/S/V, 104Q, 106C, 110V, 117A, 121W, 123G/Q/S, 124A/C/G/Q/R/T, 125E/F/S, 126T, 128A, 141Q, 149T, 153H/Q/S, 155L/P/R/V, 156E, 160T, 162A/C/D/E/F/G/H/I/K/L/M/N/P/Q/R/S/T/V/W/Y, 164R/V, 166R, 169A/G/L, 173Q/V, 174A/C/D/E/F/G/H/I/K/L/M/N/P/Q/R/S/T/V/W/Y, 176L, 180E, 182R, 183C/E/I/K, 186N, 187L/R/S, 188A, 189R, 190G/Q, 193A/G, 195A/C/D/E/F/G/H/I/K/L/M/N/P/Q/R/S/T/V/W/Y, 196F/K/M/R/S/V, 197E, 199G/V, 200N, 205A, 206M, 208G, 210A/C/D/E/F/G/H/I/K/L/M/N/P/Q/R/S/T/V/W/Y, 212A/F/G/L/S/V, 216S/W, 219V, 226S/T, 227E/S, 232T, 233D/H/R, 234L, 240E, 242D, 243V, 263S, 265C, 266V, 267R, 269S, 270L, 273A, 274Q/S, 277A/C/D/E/F/G/H/I/K/L/M/N/P/Q/R/S/T/V/W/Y, 284A/R/S, 297Y, 301I/Q/T, 303T, 304D/G, 314S, 316K/V, 318A/C/D/E/F/G/H/I/K/L/M/N/P/Q/R/S/T/V/W/Y, 331I/L/P/V, 335R, 339G, 342A/E/P/R, 343R/W, 346G/L/Q/W, 347F/R, 350R, 351A/E/H, 356S, or 359L/W, or combinations thereof, wherein the amino acid positions are relative to the reference sequence corresponding to SEQ ID NO: 172, 320, 396, 616, 670, 750, or 906, or relative to the reference sequence corresponding to residues 1-359 of SEQ ID NO: 172, 320, or 396.

18. The engineered oxalate decarboxylase polypeptide of any one of claims 14-17, wherein the amino acid sequence of the engineered oxalate decarboxylase polypeptide comprises at least one or more substitutions at amino acid positions: 13, 14, 16, 17, 26, 31, 37, 60, 79, 83, 96, 162, 174, 195, 196, 210, 226, 277, 301, or 318, or combinations thereof, wherein the amino acid positions are relative to the reference sequence corresponding to SEQ ID NO: 172, 320, 396, 616, 670, 750, or 906, or relative to the reference sequence corresponding to residues 1-359 of SEQ ID NO: 172, 320, or 396.

19. The engineered oxalate decarboxylase polypeptide of claim 18, wherein the amino acid sequence of the engineered oxalate decarboxylase polypeptide comprises at least a substitution or amino acid residue 13A/C/D/E/F/G/H/I/K/L/M/N/P/Q/R/S/T/V/W/Y, 14L/V, 16A/C/D/E/F/G/H/I/K/L/M/N/P/Q/R/S/T/V/W/Y, 17A/C/D/E/F/G/H/I/K/L/M/N/P/Q/R/S/T/V/W/Y, 26A/C/D/E/F/G/H/I/K/L/M/N/P/Q/R/S/T/V/W/Y, 31A/C/D/E/F/G/H/I/K/L/M/N/P/Q/R/S/T/V/W/Y, 37A/C/D/E/F/G/H/I/K/L/M/N/P/Q/R/S/T/V/W/Y, 60A/C/D/E/F/G/H/I/K/L/M/N/P/Q/R/S/T/V/W/Y, 79A/C/D/E/F/G/H/I/K/L/M/N/P/Q/R/S/T/V/W/Y, 83A/C/D/E/F/G/H/I/K/L/M/N/P/Q/R/S/T/V/W/Y, 96A/C/D/E/F/G/H/I/K/L/M/N/P/Q/R/S/T/V/W/Y, 162A/C/D/E/F/G/H/I/K/L/M/N/P/Q/R/S/T/V/W/Y, 174A/C/D/E/F/G/H/I/K/L/M/N/P/Q/R/S/T/V/W/Y, 195A/C/D/E/F/G/H/I/K/L/M/N/P/Q/R/S/T/V/W/Y, 196F/K/M/R/S/V, 210A/C/D/E/F/G/H/I/K/L/M/N/P/Q/R/S/T/V/W/Y, 226S/T, 277A/C/D/E/F/G/H/I/K/L/M/N/P/Q/R/S/T/V/W/Y, 301I/Q/T, or 318A/C/D/E/F/G/H/I/K/L/M/N/P/Q/R/S/T/V/W/Y, or combinations thereof, wherein the amino acid positions are relative to the reference sequence corresponding to SEQ ID NO: 172, 320, 396, 616, 670, 750, or 906, or relative to the reference sequence corresponding to residues 1-359 of SEQ ID NO: 172, 320, or 396.

20. The engineered oxalate decarboxylase polypeptide of claim 18, wherein the amino acid sequence of the engineered oxalate decarboxylase polypeptide comprises at least a substitution 13P, 14L, 16S, 17H/G, 26E, 31K, 37G, 60V, 79G, 83W, 96L, 162K, 174K, 195L, 196V, 210A/E, 226S, 277V, 301I, or 318Q, or combinations thereof, wherein the amino acid positions are relative to the reference sequence corresponding to SEQ ID NO: 172, 320, 396, 616, 670, 750, or 906, or relative to the reference sequence corresponding to residues 1-359 of SEQ ID NO: 172, 320, or 396.

21. The engineered oxalate decarboxylase polypeptide of claim 15, comprising an amino acid sequence having at least 70%, 75%, 80%, 81%, 82%, 83%, 84%, 85%, 86%, 87%, 88%, 89%, 90%, 91%, 92%, 93%, 94%, 95%, 96%, 97%, 98%, 99%, or more sequence identity to the reference sequence corresponding to residues 1-359 of SEQ ID NO: 172, or to the reference sequence corresponding to SEQ ID NO: 172, wherein the amino acid sequence comprises one or more amino acid substitutions relative to the reference sequence corresponding to residues 1-359 of SEQ ID NO: 172, or relative to the reference sequence corresponding SEQ ID NO: 172.

22. The engineered oxalate decarboxylase polypeptide of claim 21, wherein the amino acid sequence of the engineered oxalate decarboxylase polypeptide comprises at least a substitution or substitution set at amino acid position(s) 13, 212, 124/196/210/226, 5, 16/26/124/155/195/210/284, 196/226, 16/155/195/210/226, 16/195/210/226, 16/155/174/196, 16/195/226, 318, 16/195/196/210, 16/26/124/155/174/196/210, 195/210, 26/155/174/210, 316, 60, 16/155/174, 16/124/174/196, 16/226, 16/26/174/196/226, 17, 331, 124/195, 16/174/196, 188, 195/196/210, 174/196/210, 16/26/155/174, 16/155/195/196/226, 195/226/284, 16, 240, 16/26/124/155/195/196/226, 183/232/339/343, 183/206, 63, 173/347, 16/26/174/196, 16/284, 46, 16/124/195/196, 274, 174/196, 155/174/196, 174/196/226, 16/124/155/174/195, 16/26/155/174/196, 26/174/196/210/284, 16/195/196/284, 174, 16/124/174/195/210/226/284, 16/174/195/284, 26/174/196/210/226/284, 174/196/226/284, 124/174/196, 26/174/195/210/226, 162, 16/124/195/196/284, 206/343, 16/195/196, 16/26/174/195/196/210/226, 155/195/196/226, 18, 335, 124/155/174/195/226, 26/155/174/195/226, 195/196, 153, 155/174/195, 174/195/210/284, 174/195, 37, 124/174/195/226/284, 176, 16/155/174/195/196/226/284, 10, 169/173, 155, 33, 173/183/343/347, 104/265, or 233, wherein the amino acid positions are relative to the reference sequence corresponding to residues 1-359 of SEQ ID NO: 172, or relative to the reference sequence corresponding SEQ ID NO: 172.

23. The engineered oxalate decarboxylase polypeptide of claim 15, comprising an amino acid sequence having at least 70%, 75%, 80%, 81%, 82%, 83%, 84%, 85%, 86%, 87%, 88%, 89%, 90%, 91%, 92%, 93%, 94%, 95%, 96%, 97%, 98%, 99%, or more sequence identity to a reference sequence corresponding to residues 1-359 of SEQ ID NO: 320, or to the reference sequence corresponding to SEQ ID NO: 320, wherein the amino acid sequence comprises one or more amino acid substitutions relative to the reference sequence corresponding to residues 1-359 of SEQ ID NO: 320, or relative to the reference sequence corresponding to SEQ ID NO: 320.

24. The engineered oxalate decarboxylase polypeptide of claim 23, wherein the amino acid sequence of the engineered oxalate decarboxylase polypeptide comprises at least a substitution or substitution set at amino acid position(s) 13/17/196, 17/212/331, 17/26/196/212/226, 17/26/196/212/226/331, 13/17/26/196/331, 17/60/196/226, 17/46/212, 26/60/196/226/331, 17/46/196/212/274/331, 212, 17/196/226, 13/17/26/212/331, 13/17/212/226/331, 196/212/331, 13/17/196/331, 13/17/26/212/226/331, 17/60/196/212/226/331, 13/17/212, 13/17/26/331, 13/17, 13/17/26/196, 46/196/212/226, 17/60/196, 17/196/331, 13/17/46/226/331, 17/196/226/331, 17/46/196/212/331, 17/46/212/331, 17/196, 13/17/212/226, 17/212, 17/26/212, 13/17/226/331, 17/196/212/331, 17/196/212/226/331, 13/17/26/226/331, 46/60/196/226/331, 17/46/196/331, 13/17/46/196, 196/212, 13/17/26, 17/83/263, 17/83/173/227, 17/227/301, 17/83/227/263, 17/83/125, 17/83/173, 17/263/301, 17/125, 17/83/301, 17/173, 17/83/227, 17/227, 17, 17/125/227, 17/83, 128, 76, 141, 110, 79, 117, or 61, wherein the amino acid positions are relative to the reference sequence corresponding to residues 1-359 of SEQ ID NO: 320, or relative to the reference sequence corresponding to SEQ ID NO: 320.

25. The engineered oxalate decarboxylase polypeptide of claim 15, comprising an amino acid sequence having at least 70%, 75%, 80%, 81%, 82%, 83%, 84%, 85%, 86%, 87%, 88%, 89%, 90%, 91%, 92%, 93%, 94%, 95%, 96%, 97%, 98%, 99%, or more sequence identity to a reference sequence corresponding to sequence of residues 1-359 of SEQ ID NO: 396, or to the reference sequence corresponding to SEQ ID NO: 396, wherein the amino acid sequence comprises one or more amino acid substitutions relative to the reference sequence corresponding to residues 1-359 of SEQ ID NO: 396, or relative to the reference sequence corresponding to SEQ ID NO: 396.

26. The engineered oxalate decarboxylase polypeptide of claim 25, wherein the amino acid sequence of the engineered oxalate decarboxylase polypeptide comprises at least a substitution or substitution set at amino acid position(s) 13/17/79, 13/14/17/60/79, 13/17/79/83, 13/17/79/301, 13/14/17/60/79/212, 17/60/197, 13/60/212, 13/14/17/60/79/83/301, 13/17/60/79, 17/60/301, 14/17/79, 17/60/83, 17/79, 13/17/60/79/83/301, 342, 52/190, 94/190, 190/342/351, 13/79, 13/96, 273, 126, 96, 79, 269, 40, 44, 267, 266, 160, 277, 149, 22, 234, 54, 297, 106, or 13/43, wherein the amino acid positions are relative to the reference sequence corresponding to residues 1-359 of SEQ ID NO: 396, or relative to the reference sequence corresponding to SEQ ID NO: 396.

27. The engineered oxalate decarboxylase polypeptide of claim 15, comprising an amino acid sequence having at least 70%, 75%, 80%, 81%, 82%, 83%, 84%, 85%, 86%, 87%, 88%, 89%, 90%, 91%, 92%, 93%, 94%, 95%, 96%, 97%, 98%, 99%, or more sequence identity to the reference sequence corresponding to SEQ ID NO: 670, wherein the amino acid sequence comprises one or more amino acid substitutions relative to the reference sequence corresponding to SEQ ID NO: 670.

28. The engineered oxalate decarboxylase polypeptide of claim 27, wherein the amino acid sequence of the engineered oxalate decarboxylase polypeptide comprises at least a substitution at amino acid position 37, 125, 162, 94, 195, 85, 103, 232, 189, 186, 155, 193, 342, 196, 63, 33, 351, 314, 187, 303, 164, 153, 346, 183, 19, 123, 350, 205, 284, 199, 343, 200, 208, 169, 190, or 121, or combinations thereof, wherein the amino acid positions are relative to the reference sequence corresponding to SEQ ID NO: 670.

29. The engineered oxalate decarboxylase polypeptide of claim 15, comprising an amino acid sequence having at least 70%, 75%, 80%, 81%, 82%, 83%, 84%, 85%, 86%, 87%, 88%, 89%, 90%, 91%, 92%, 93%, 94%, 95%, 96%, 97%, 98%, 99%, or more sequence identity to the reference sequence corresponding to SEQ ID NO: 616, wherein the amino acid sequence comprises one or more amino acid substitutions relative to the reference sequence corresponding to SEQ ID NO: 616.

30. The engineered oxalate decarboxylase polypeptide of claim 29, wherein the amino acid sequence of the engineered oxalate decarboxylase polypeptide comprises at least a substitution or substitution set at amino acid position(s) 14/26/60/318, 14/26/60/94/162/212, 60/162/226, 60, 14/125/162/212/318, 60/125/226, 14/125/162/226, 26/60/162/226/318, 14/26/94/162/212/226, 14/60/162, 14/60/162/226, 14/94/162/318, 14/94/162, 14/60/226, 14/60/94/212, 14/60/162/212, 14/162, 14/94/212/318, 14/60, 14/26/162, 14, 14/318, 14/162/226/318, 14/125/212, 14/125/226/318, 14/26/60/162, 14/125/162/212/226, 14/94/125/162/318, 14/125/226, 277, 166, 233, 83, 5, 342, 96, 284, or 26, wherein the amino acid positions are relative to the reference sequence corresponding SEQ ID NO: 616.

31. The engineered oxalate decarboxylase polypeptide of claim 15, comprising an amino acid sequence having at least 70%, 75%, 80%, 81%, 82%, 83%, 84%, 85%, 86%, 87%, 88%, 89%, 90%, 91%, 92%, 93%, 94%, 95%, 96%, 97%, 98%, 99%, or more sequence identity to the reference sequence corresponding to SEQ ID NO: 750, wherein the amino acid sequence comprises one or more amino acid substitutions relative to the reference sequence corresponding to SEQ ID NO: 750.

32. The engineered oxalate decarboxylase polypeptide of claim 31, wherein the amino acid sequence of the engineered oxalate decarboxylase polypeptide comprises at least a substitution or substitution set at amino acid position(s) 5/26/83/342, 5/26/277, 5/96/277, 5/83/277/342, 26/83/277, 5/26/83/277, 5/277/342, 5/26/166/277, 83/277/342, 83/96/277/342, 83/96/277, 26/83/277/342, 5/26/83/277/342, 5/83/277, 26/277, 83/277, 5/35/277, 5/26/83/96/277, 5/26/96/277, 5/277, 5/166/277, 26/83/96/277/342, 277, 26/277/342, 5, or 5/83/96/277/342, wherein the amino acid positions are relative to the reference sequence corresponding to SEQ ID NO: 750.

33. The engineered oxalate decarboxylase polypeptide of claim 15, comprising an amino acid sequence having at least 70%, 75%, 80%, 81%, 82%, 83%, 84%, 85%, 86%, 87%, 88%, 89%, 90%, 91%, 92%, 93%, 94%, 95%, 96%, 97%, 98%, 99%, or more sequence identity to a reference sequence corresponding to SEQ ID NO: 906, wherein the amino acid sequence comprises one or more amino acid substitutions relative to the reference sequence corresponding to SEQ ID NO: 906.

34. The engineered oxalate decarboxylase polypeptide of claim 33, wherein the amino acid sequence of the engineered oxalate decarboxylase polypeptide comprises at least a substitution at amino acid position 26, 31, 96, 60, 318, 210, 277, 37, 16, 195, 79, 17, 13, 83, 162, or 174, or combinations thereof, wherein the amino acid positions are relative to the reference sequence corresponding to SEQ ID NO: 906.

35. The engineered oxalate decarboxylase polypeptide of claim 33, wherein the amino acid sequence of the engineered oxalate decarboxylase polypeptide comprises at least a substitution or substitution set at amino acid position(s) 174/318, 26/96, 60/318, 31/318, 162/174/318, 174/277/318, 26/195/318, 60/162/195, 60/162/318, 174/195/277, 16/17/174, 60/195/277, 37/277/318, 16/162/195/277, 26/79/83/162, 26/31/60/318, 16/174/195/277, 13/37/83/162, 16/17/60/195, 13/17/37/83, 31/37/162/174/318, 13/16/31/83/162, 16/60/174/195/318, 17/60/96/162/195/277, 13/26/60/83/162/174, 17/31/60/162/174/277, 16/17/26/83/96/277, 17/26/37/174/277/318, 13/16/31/60/162/174, 13/17/31/83/277/318, 13/16/17/31/83/162/318, 13/16/60/83/162/195/318, 13/16/17/31/37/83/96/162, 13/17/26/37/60/83/162/210/318, 13/16/26/31/83/96/162/174/318, 13/16/17/31/60/83/96/162/174/195/318, 13/16/26/37/60/83/162/174/195/210/318, 13/16/37/79/83/96/162/174/195/210/277, 13/17/26/31/37/60/79/83/96/162/174/210, 13/16/17/26/37/79/83/96/174/195/210/318, 13/26/31/37/60/83/96/162/174/195/210/277/318, 13/16/17/31/37/60/79/83/96/162/174/195/210/318, 13/16/17/31/60/79/83/96/162/174/195/210/277/318, 13/16/17/26/37/60/79/96/162/174/195/210/277/318, 13/26/31/37/60/79/83/96/162/174/195/210/277/318, 13/16/17/26/31/37/60/96/162/174/195/210/277/318, 13/16/17/26/31/37/79/83/96/162/174/195/210/318, 13/16/17/26/31/37/60/79/96/162/174/210/277/318, 13/17/26/31/37/60/79/83/96/162/174/195/210/277/318, 13/16/26/31/37/60/79/83/96/162/174/195/210/277/318, 16/17/26/31/37/60/79/83/96/162/174/195/210/277/318, or 13/16/17/26/31/37/60/79/83/96/162/174/195/210/277/318, wherein the amino acid positions are relative to the reference sequence corresponding to SEQ ID NO: 906.

36. The engineered oxalate decarboxylase polypeptide of claim 1, wherein the amino acid sequence of the engineered oxalate decarboxylase polypeptide comprises at least a substitution or substitution set of an oxalate decarboxylase polypeptide set forth in Tables 4-1, 4-2, 4-3, 4-4, 4-5, 4-6, 4-7, 5-1, and 5-2, wherein the amino acid positions are relative to the reference sequence corresponding to SEQ ID NO: 172, 320, 396, 616, 670, 750, or 906, or relative to the reference sequence corresponding to residues 1-359 of SEQ ID NO: 172, 320, or 396.

37. The engineered oxalate decarboxylase polypeptide of claim 1, comprising an amino acid sequence comprising SEQ ID NO: 4, an amino acid sequence comprising residues 1-359 of an even-numbered sequence of SEQ ID NOS: 28-614, an amino acid comprising an even-numbered SEQ ID NO. of SEQ ID NOs: 28-614, or an amino acid sequence comprising an even-numbered SEQ ID NO. of SEQ ID NOs: 616-1622, optionally wherein the amino acid sequence includes 1, 2, 3, 4, 5, 6, 7, 8, 9, or up to 10 substitutions.

38. The engineered oxalate decarboxylase polypeptide of claim 1, wherein the amino acid sequence of the engineered oxalate decarboxylase polypeptide comprises residues 1-359 of SEQ ID NO: 172, 320, or 396, or comprises SEQ ID NO: 172, 320, 396, 616, 670, 750, or 906, optionally wherein the amino acid sequence includes 1, 2, 3, 4, 5, 6, 7, 8, 9, or up to 10 substitutions.

39. The engineered oxalate decarboxylase polypeptide of claim 37 or 38, wherein the amino acid sequence includes 1, 2, 3, 4, or 5 substitutions.

40. The engineered oxalate decarboxylase polypeptide of any one of claims 1-39, wherein the engineered oxalate decarboxylase polypeptide has oxalate decarboxylase activity and exhibits one or more improved enzyme properties compared to a reference oxalate decarboxylase having a sequence corresponding to SEQ ID NO: 2, 4, 172, 320, 396, 616, 670, 750, or 906, or a reference sequence corresponding to residues 1-359 of SEQ ID NO: 172, 320, or 396.

41. The engineered oxalate decarboxylase polypeptide of claim 40, wherein the improved property is increased activity at about pH 6 or less, about pH 5.5 or less, about pH 4.5 or less, about pH 3 or less, about pH 2.6 or less, or about pH 2.4 or less, to about pH 2 compared to the reference oxalate decarboxylase.

42. The engineered oxalate decarboxylase polypeptide of claim 40, wherein the improved property is increased thermostability compared to the reference oxalate decarboxylase.

43. The engineered oxalate decarboxylase polypeptide of claim 40, wherein the improved property is increased stability at about pH 6 or less, about pH 5.5 or less, about pH 4.5 or less, about pH 3 or less, about pH 2.6 or less, or about pH 2.4 or less, to about pH 2 compared to the reference oxalate decarboxylase.

44. The engineered oxalate decarboxylase polypeptide of claim 40, wherein the improved property is increased resistance to proteolysis by pepsin or chymotrypsin at pH of about 2.2 to 3.2, compared to the reference oxalate decarboxylase.

45. The engineered oxalate decarboxylase polypeptide of claim 40, wherein the improved enzyme property of the engineered oxalate decarboxylase polypeptide is selected from (a) increased activity on oxalate, (b) increased thermal stability, (c) increased stability at acidic pH, (d) increased activity at acidic pH, (e) increased activity at neutral pH, (f) increased expression, (g) increased solubility, and (h) increased resistance to proteolysis, or any combination of (a), (b), (c), (d), (e), (f), (g) and (h), compared to a reference oxalate decarboxylase having an amino acid sequence corresponding to SEQ ID NO: 2, 4, 172, 320, 396, 616, 670, 750, or 906, or an amino acid sequence corresponding to residues 1-359 of SEQ ID NO: 172, 320, or 396.

46. The engineered oxalate decarboxylase polypeptide of any one of claims 40-45, wherein the reference oxalate decarboxylase has the amino acid sequence corresponding to SEQ ID NO: 2 or 4.

47. The engineered oxalate decarboxylase polypeptide of any of claims 1-46, wherein the engineered oxalate decarboxylase polypeptide is purified.

48. A pharmaceutical composition comprising at least one engineered oxalate decarboxylase polypeptide of any of claims 1-47, and a pharmaceutically acceptable excipient or carrier.

49. The pharmaceutical composition of claim 48, wherein the composition is suitable for oral administration to a human patient.

50. A recombinant polynucleotide comprising a polynucleotide sequence encoding at least an engineered oxalate decarboxylase polypeptide of any of claims 1-46.

51. The recombinant polynucleotide of claim 50, comprising a polynucleotide sequence having at least 70%, 75%, 80%, 81%, 82%, 83%, 84%, 85%, 86%, 87%, 88%, 89%, 90%, 91%, 92%, 93%, 94%, 95%, 96%, 97%, 98%, 99%, or more sequence identity to a reference polynucleotide sequence corresponding to SEQ ID NO: 3, a reference polynucleotide sequence corresponding to nucleotide residues 1-1077 of an odd-numbered SEQ ID NO. of SEQ ID NOs: 27-613, a reference polynucleotide sequence corresponding to an odd-numbered SEQ ID NO. of SEQ ID NOs: 27-613, or reference polynucleotide sequence corresponding to an odd-numbered SEQ ID NO. of SEQ ID NOs: 615-1621, wherein the recombinant polynucleotide encodes an engineered oxalate decarboxylase polypeptide.

52. The recombinant polynucleotide of claim 50, wherein the polynucleotide sequence comprises at least 70%, 75%, 80%, 81%, 82%, 83%, 84%, 85%, 86%, 87%, 88%, 89%, 90%, 91%, 92%, 93%, 94%, 95%, 96%, 97%, 98%, 99%, or more sequence identity to a reference polynucleotide sequence corresponding to SEQ ID NO: 33, 171, 319, 395, 615, 669, 749, or 905, or to a reference polynucleotide sequence corresponding to nucleotide residues 1 to 1077 of SEQ ID NO: 171, 319, or 395, wherein the recombinant polynucleotide encodes an engineered oxalate decarboxylase polypeptide.

53. The recombinant polynucleotide of any of claims 50-52, wherein the polynucleotide sequence is codon-optimized.

54. The recombinant polynucleotide of claim 50, comprising a polynucleotide sequence comprising SEQ ID NO: 1 or 3; a polynucleotide sequence comprising nucleotide residues 1-1077 of an odd-numbered SEQ ID NO. of SEQ ID NOs: 27-613; a polynucleotide sequence comprising an odd-numbered SEQ ID NO. of SEQ ID NOs: 27-613; or a polynucleotide sequence comprising an odd-numbered SEQ ID NO. of SEQ ID NOs: 615-1621.

55. The recombinant polynucleotide of claim 50, comprising the polynucleotide sequence comprising SEQ ID NO: 3, 171, 319, 395, 615, 669, 749, or 905, or comprising nucleotide residues 1-1077 of SEQ ID NO: 171, 319, or 395.

56. An expression vector comprising at least one recombinant polynucleotide of any one of claims 50-55.

57. The expression vector of claim 56, wherein the recombinant polynucleotide is operably linked to a control sequence.

58. The expression vector of claim 57, wherein the control sequence comprises a promoter.

59. A host cell comprising at least one recombinant polynucleotide of any one of claims 50-55, or the expression vector of any one of claims 56-58.

60. The host cell of claim 59, wherein the host cell is a prokaryotic cell or eukaryotic cell.

61. The host cell of claim 60, wherein the host cell is a bacterial cell.

62. A method of producing an engineered oxalate decarboxylase polypeptide comprising culturing a host cell of any one of claims 59-61, under suitable culture conditions such that the engineered oxalate decarboxylase polypeptide is produced.

63. The method of claim 62, further comprising recovering the engineered oxalate decarboxylase polypeptide from the culture and/or host cells.

64. The method of claim 62 or 63, further comprising a step of purifying the engineered oxalate decarboxylase polypeptide.

65. A method of reducing levels of oxalate in a subject, comprising administering to a subject in need thereof an effective amount of an engineered oxalate decarboxylase polypeptide of any one of claims 1-47 or a composition of claim 48 or 49 to reduce levels of oxalate in the subject.

66. The method of claim 65, wherein reducing the levels of oxalate is in urine and/or plasma levels of oxalate.

67. A method for treating and/or preventing the symptoms of hyperoxaluria in a subject, comprising administering to a subject with hyperoxaluria an effective amount of an engineered oxalate decarboxylase polypeptide of any of claims 1-47 or a composition of claim 48 or 49.

68. The method of claim 67, wherein the hyperoxaluria is secondary, enteric, or idiopathic hyperoxaluria.

69. The method of claims 67 or 68, wherein the symptoms of hyperoxaluria are ameliorated.

70. The method of claim 69, wherein the levels of oxalate in urine and/or plasma is reduced.

71. The method of any of claims 67-70, wherein the subject is able to eat a diet that is higher in its oxalate content as compared to diets required by subjects who are afflicted with hyperoxaluria.

72. Use of the engineered oxalate decarboxylase of any one of claims 1-47 or the composition of claim 48 or 49 for treating a disease or condition associated with elevated levels of oxalate.

73. Use of the engineered oxalate decarboxylase of any one of claims 1-47 in the preparation of a medicament for treating a disease or condition associated with elevated levels of oxalate.

74. The use of claim 72 or 73, wherein the disease or condition associated with elevated levels of oxalate is hyperoxaluria.

The application's sequence listing, which the Patent Office published only in electronic form, follows.

SEQUENCE LISTING (1622 sequences)

SEQ ID NO: 1 - DNA, 1077 bp, synthetic construct
  misc_feature 1..1077: note = Wild type oxalate decarboxylase from Gemmata sp. SH-PL17
  source 1..1077: mol_type = other DNA
atgggtgatccgacctttatgaataatgtgccagaccatctgctggcggataaagatttgccgacgttcaagtttgccctggaaaagagcgagggcaaagtcattgggaaaagttcgggaaaagaagcaaccgttgttcagttacctatctccaaaggcattgctggtgtgagcatgactcttgaaccgggtgcgatgcgcgaattgcactggcatgccacagcagcagagtgggctttcgtattaaccggccacgtccgtacgacggtgatcgatccacaaggtgcggccgaaaccaacgactttggaccgggcgacgtgtggtattttcctcgcggtcatgggcacatgctggaatgcctgggcgataaaccggcgcatttcattctgatcttcgataacggctacttctcagagtttggcaccttctctattactgactggatcggtcacacaccgaaagcgcttctcgccaagaactttggtctgcccgaatcggcttttgatgggtttcccaaagacgaggtctattttgcacgtggcgcggttccaccagccacccctgcagcgcctttacagggacgcaaattgccaccactcacgcataaatacgaactcctcgaacagccgcctcataaagtattcaaaggtggtcgtgaatggcgcgtggatagcacccgttttcccatttccaagactgtaaccggcgttgttcttgatttggaacccggcgcgttacgcgagcttcactggcatcctaatgctgacgagtggcaatatgtgatcgatggcaacattagtgtgacgatgttcggttctcatggccgttaccgcaccgaacagatggagaaaggtgatgtcgggtatattccacaggggtatggccacagcatcgaaaatgtgggagatcgtccttgtcgcgtcttgattggctttaacacaggtaactacgaagccatcgacttatcacaatggattgcaggtaatcccgcggatgttcttgccacgaacttctccaaacccaccagcctctttgaaaagttcccaaaacaggacgtgtttattgctcctggcaag

SEQ ID NO: 2 - protein, 359 aa, synthetic construct
  REGION 1..359: note = Wild type oxalate decarboxylase from Gemmata sp. SH-PL17
MGDPTFMNNVPDHLLADKDLPTFKFALEKSEGKVIGKSSGKEATVVQLPISKGIAGVSMTLEPGAMRELHWHATAAEWAFVLTGHVRTTVIDPQGAAETNDFGPGDVWYFPRGHGHMLECLGDKPAHFILIFDNGYFSEFGTFSITDWIGHTPKALLAKNFGLPESAFDGFPKDEVYFARGAVPPATPAAPLQGRKLPPLTHKYELLEQPPHKVFKGGREWRVDSTRFPISKTVTGVVLDLEPGALRELHWHPNADEWQYVIDGNISVTMFGSHGRYRTEQMEKGDVGYIPQGYGHSIENVGDRPCRVLIGFNTGNYEAIDLSQWIAGNPADVLATNFSKPTSLFEKFPKQDVFIAPGK

SEQ ID NO: 3 - DNA, 1110 bp, synthetic construct
  misc_feature 1..1110: note = Wild type oxalate decarboxylase from Gemmata sp. SH-PL17 with C-terminal His tag
  source 1..1110: mol_type = other DNA
atgggtgatccgacctttatgaataatgtgccagaccatctgctggcggataaagatttgccgacgttcaagtttgccctggaaaagagcgagggcaaagtcattgggaaaagttcgggaaaagaagcaaccgttgttcagttacctatctccaaaggcattgctggtgtgagcatgactcttgaaccgggtgcgatgcgcgaattgcactggcatgccacagcagcagagtgggctttcgtattaaccggccacgtccgtacgacggtgatcgatccacaaggtgcggccgaaaccaacgactttggaccgggcgacgtgtggtattttcctcgcggtcatgggcacatgctggaatgcctgggcgataaaccggcgcatttcattctgatcttcgataacggctacttctcagagtttggcaccttctctattactgactggatcggtcacacaccgaaagcgcttctcgccaagaactttggtctgcccgaatcggcttttgatgggtttcccaaagacgaggtctattttgcacgtggcgcggttccaccagccacccctgcagcgcctttacagggacgcaaattgccaccactcacgcataaatacgaactcctcgaacagccgcctcataaagtattcaaaggtggtcgtgaatggcgcgtggatagcacccgttttcccatttccaagactgtaaccggcgttgttcttgatttggaacccggcgcgttacgcgagcttcactggcatcctaatgctgacgagtggcaatatgtgatcgatggcaacattagtgtgacgatgttcggttctcatggccgttaccgcaccgaacagatggagaaaggtgatgtcgggtatattccacaggggtatggccacagcatcgaaaatgtgggagatcgtccttgtcgcgtcttgattggctttaacacaggtaactacgaagccatcgacttatcacaatggattgcaggtaatcccgcggatgttcttgccacgaacttctccaaacccaccagcctctttgaaaagttcccaaaacaggacgtgtttattgctcctggcaagggccaaactggccaccatcaccatcaccattag

SEQ ID NO: 4 - protein, 369 aa, synthetic construct
  REGION 1..369: note = Wild type oxalate decarboxylase from Gemmata sp. SH-PL17 with C-terminal His tag
MGDPTFMNNVPDHLLADKDLPTFKFALEKSEGKVIGKSSGKEATVVQLPISKGIAGVSMTLEPGAMRELHWHATAAEWAFVLTGHVRTTVIDPQGAAETNDFGPGDVWYFPRGHGHMLECLGDKPAHFILIFDNGYFSEFGTFSITDWIGHTPKALLAKNFGLPESAFDGFPKDEVYFARGAVPPATPAAPLQGRKLPPLTHKYELLEQPPHKVFKGGREWRVDSTRFPISKTVTGVVLDLEPGALRELHWHPNADEWQYVIDGNISVTMFGSHGRYRTEQMEKGDVGYIPQGYGHSIENVGDRPCRVLIGFNTGNYEAIDLSQWIAGNPADVLATNFSKPTSLFEKFPKQDVFIAPGKGQTGHHHHHH

SEQ ID NO: 5 - DNA, 1305 bp, synthetic construct
  misc_feature 1..1305: note = Wild type oxalate decarboxylase from Flammulina velutipes
  source 1..1305: mol_type = other DNA
atgagtactactacaggtaccggcacagcgacgggtacctcaacggcagcagaaccgagcgctacggtgccatttgcctctaccgatcctaacccagttctgtggaatgagacatccgaccccgcgttagtcaaacctgaacgtaaccagctgggcgccacgattcaaggacccgataatttgccaatcgatctgcagaatcctgaccttttagcgcctcccactactgatcatgggttcgtgggcaacgctaagtggccattctcgtttagcaaacagcgcctgcaaacgggtggttgggcacgccagcagaacgaagtagtattgccactggcgacgaatcttgcctgcacaaacatgcgtctggaagctggcgcgattcgtgagttacactggcataaaaatgcggaatgggcctatgttctgaaaggctcgacgcaaatctctgcagtggacaacgaagggcgcaactacattagtactgtgggtcctggagatctgtggtattttccaccaggtattcctcactcactgcaggccacagcggatgatcccgaaggcagcgagttcatcctggtctttgacagcggcgcctttaatgatgatggtacgttcttgctcactgactggctctcccatgtacccatggaagttatcctgaagaactttcgcgcgaagaatcctgcagcatggagccacattccagctcagcagctgtacatcttcccctcagaacctcctgcggataatcaaccagacccagtctccccacaaggcacggtgcctttgccctatagctttaactttagctcggttgagcccactcagtactctggtggcacggccaagattgcggacagcacgacatttaacatttccgtggctatcgcagtcgccgaagtgactgtagaaccaggagcgctgcgtgagctccattggcatcccacagaggatgaatggacgttctttattagtgggaatgcacgcgtgactatctttgctgcgcagtctgttgcctccacgttcgattatcaaggcggcgatattgcgtatgttcctgcctcgatgggtcactacgtcgaaaacatcgggaacactactctgacatatcttgaagtgtttaatacggaccgtttcgcggatgtctcattaagccagtggctggcccttacacctccatcggtagttcaggcacatctgaacctggacgatgaaacgctcgcggagctgaaacaattcgcgacaaaagccactgtggttggtcccgtgaacggccaaactggccaccatcaccatcaccattag

SEQ ID NO: 6 - protein, 434 aa, synthetic construct
  REGION 1..434: note = Wild type oxalate decarboxylase from Flammulina velutipes
MSTTTGTGTATGTSTAAEPSATVPFASTDPNPVLWNETSDPALVKPERNQLGATIQGPDNLPIDLQNPDLLAPPTTDHGFVGNAKWPFSFSKQRLQTGGWARQQNEVVLPLATNLACTNMRLEAGAIRELHWHKNAEWAYVLKGSTQISAVDNEGRNYISTVGPGDLWYFPPGIPHSLQATADDPEGSEFILVFDSGAFNDDGTFLLTDWLSHVPMEVILKNFRAKNPAAWSHIPAQQLYIFPSEPPADNQPDPVSPQGTVPLPYSFNFSSVEPTQYSGGTAKIADSTTFNISVAIAVAEVTVEPGALRELHWHPTEDEWTFFISGNARVTIFAAQSVASTFDYQGGDIAYVPASMGHYVENIGNTTLTYLEVFNTDRFADVSLSQWLALTPPSVVQAHLNLDDETLAELKQFATKATVVGPVNGQTGHHHHHH

SEQ ID NO: 7 - DNA, 1155 bp, synthetic construct
  misc_feature 1..1155: note = Wild type oxalate decarboxylase from Bacillus subtilis
  source 1..1155: mol_type = other DNA
atgaagaaacagaacgatattccacaaccgatccgtggcgacaaaggtgcgaccgtgaagattccgcgcaatatcgaacgtgatcgccagaaccctgatatgctggttccgccagagacggaccatgggactgtcagcaacatgaaattctccttttcggatacccacaatcgcttggaaaaaggcggatatgcccgtgaagtgacagtacgtgaactgccgattagtgagaacctcgcaagcgttaatatgcgcttaaaacccggtgctatccgtgaactgcattggcacaaagaagcggaatgggcctacatgatttatggttctgcacgcgtgaccatcgtcgacgagaaaggccgctcatttatcgatgatgttggcgaaggtgacctgtggtacttcccgtctggccttcctcatagcattcaggcgctggaggagggagccgaatttttgttagtgttcgatgatggttccttttcggaaaatagtacgtttcaacttaccgattggctcgctcacactccgaaagaagtaattgcggcaaacttcggcgtcacgaaggaagaaattagcaatttgcccgggaaagagaagtatatctttgaaaaccagttaccgggctcgctcaaagacgacattgtggaaggtccaaacggtgaggttccgtacccgttcacctatcgtcttcttgaacaggaacctatcgagtcagaaggcggcaaagtgtatattgcggatagcacaaactttaaagtctccaagaccattgccagtgcgttagtgacggtagaaccaggtgctatgcgcgagttgcattggcatccgaatactcacgagtggcaatactacatctctgggaaagcacgtatgaccgtttttgccagcgatggacatgcgcgcacgttcaattatcaggcaggcgacgtggggtatgtcccgtttgccatgggtcactacgttgaaaacatcggcgatgaaccactcgtgttcttggaaatttttaaagacgaccattatgcggatgtctcgttaaatcaatggctcgccatgcttcccgaaaccttcgttcaggcgcacttagatttgggcaaagattttaccgacgtgctcagcaaagagaaacatccggtggtaaaaaagaagtgctccaag

SEQ ID NO: 8 - protein, 385 aa, synthetic construct
  REGION 1..385: note = Wild type oxalate decarboxylase from Bacillus subtilis
MKKQNDIPQPIRGDKGATVKIPRNIERDRQNPDMLVPPETDHGTVSNMKFSFSDTHNRLEKGGYAREVTVRELPISENLASVNMRLKPGAIRELHWHKEAEWAYMIYGSARVTIVDEKGRSFIDDVGEGDLWYFPSGLPHSIQALEEGAEFLLVFDDGSFSENSTFQLTDWLAHTPKEVIAANFGVTKEEISNLPGKEKYIFENQLPGSLKDDIVEGPNGEVPYPFTYRLLEQEPIESEGGKVYIADSTNFKVSKTIASALVTVEPGAMRELHWHPNTHEWQYYISGKARMTVFASDGHARTFNYQAGDVGYVPFAMGHYVENIGDEPLVFLEIFKDDHYADVSLNQWLAMLPETFVQAHLDLGKDFTDVLSKEKHPVVKKKCSK

SEQ ID NO: 9 - DNA, 1158 bp, synthetic construct
  misc_feature 1..1158: note = Wild type oxalate decarboxylase from Bacillus vallismortis
  source 1..1158: mol_type = other DNA
atgagcaaagaaaacaactgcaatattccgcagccaatccgtggcgataaaggtgcgaccgtgacgattccgcgcaatctggagcgtgaccgccaaaaccctgatatgttaactccaccggaaaccgatcatggaacggttgacaacatgaagttctccttttcggatgtccacaatcgcctggagaaaggcggttatgcacgtgaagtaaccgtgcgcgaattgcccatcagtgaaaatctggcctctgttaacatgcgtctcaaaccgggtgctattcgcgaacttcattggcacaaagaagcggagtgggcctacatgctgacagggaaggcacgtgtcaccatcgtggatgaacagggccgcagctttattgacgacgtaaaagagggcgatctgtggtatttcccgtcaggtttaccgcatagtattcaggcgctgaaagaagggtgtgaatttctgttggtgttcgatgatggctcgtttagcgagaactcaacgttccaacttactgactggctggctcatacccctctcgatgttatcgccaataattttggtgtctccgaaaaagacctggcgggattgcccggcaaggagaaatacatctttgaagaaccagtgccgggcaaactgaaggatgatattgttgaaggtccgaacggtgaagtaccgtatcctttcacataccgtctgttagatgaaggaccaacggcagaaaccgatggcggcaaagtgtatattgctgactctaccaactttaaagtcagcaagacaatcgcgtcggccctggtggttgttgaaccgggtgcgatgcgcgaacttcactggcatcccaatactcacgagtggcagtattatatttctgggaaaggccgtatgaccgtgttcgcaagtgacggtcatgcgcgcacgtttaactaccaggccggcgatgtcgggtacgtgccgtttgccatgggccactatgtcgagaatctcggtgatgagccgctggtattcctggaaatctttaaagacgaccattacgcggatgtgagcctgaaccaatggttggcaatgctgccagagaaattcgttcagcagcacttagatctcgggaaagactttaccgatattctgtccaaagaaaaacatccggtggtgaagaagaaatgc

SEQ ID NO: 10 - protein, 386 aa, synthetic construct
  REGION 1..386: note = Wild type oxalate decarboxylase from Bacillus vallismortis
MSKENNCNIPQPIRGDKGATVTIPRNLERDRQNPDMLTPPETDHGTVDNMKFSFSDVHNRLEKGGYAREVTVRELPISENLASVNMRLKPGAIRELHWHKEAEWAYMLTGKARVTIVDEQGRSFIDDVKEGDLWYFPSGLPHSIQALKEGCEFLLVFDDGSFSENSTFQLTDWLAHTPLDVIANNFGVSEKDLAGLPGKEKYIFEEPVPGKLKDDIVEGPNGEVPYPFTYRLLDEGPTAETDGGKVYIADSTNFKVSKTIASALVVVEPGAMRELHWHPNTHEWQYYISGKGRMTVFASDGHARTFNYQAGDVGYVPFAMGHYVENLGDEPLVFLEIFKDDHYADVSLNQWLAMLPEKFVQQHLDLGKDFTDILSKEKHPVVKKKC

SEQ ID NO: 11 - DNA, 1149 bp, synthetic construct
  misc_feature 1..1149: note = Wild type oxalate decarboxylase from Bacillus glycinifermentans
  source 1..1149: mol_type = other DNA
atggaaaagaataaacagattccggaaccaatccgtggcgagaaaggagcgaccaccaagattccgcataacatcgaacgcgatcgccaaaaccctgacatgctggtgccgccggagacggatcacggtactgtccccaacatgaaatttagcttctcggacgttcataatcgtttggaaacaggtggctatgcccgcgaagtaaccgtgcgtgaactgccggtctccgataacattgcaagtgtgaatatgcgcttaaaacctggcgctatccgtgaacttcactggcataaagaagcggagtgggcctacatgctgtatggttctgcacgcattactagcgttgatcaggatgggaagaactttatcgaggacgtgaaagaaggagatctgtggtacttcccatcaggcctcccgcactcgattcaggcgctggacgaaggttgcgagtttctgctggttttcgatgatggcagcttttccgagaatagtacgtttcaagtaaccgactggttagctcatacgcccgatgatgtcattgccgccaacttcggtatcagcgaagaaattgttgcagcattgccggacgaggagaaatatatctttcagaaagctattccgggctcactcgaaaatgataaagtggactctccaaacggcacagttcctgaatcgttcagttaccgtctgctggaacaggaacctatcgccagcagcggtggcaaagtctggattgctgattccaccaattttaaagcctcgaagacaattgccgcagcacttgttgaagtagaaccaggtgggatgcgcgagctgcattggcacccgaacacggatgaatggcagtattatatctctggcgaggctaagatgaccgtgtttgcctcagacggccatgcacgtactttcaattaccgtgctggtgatgtgggatatgtcccttttgccatgggccactacgtgcaaaacacgggtgacaaaccgttgcgcttcctggaaatcttcaaagatgatcattatgcagacattagcttaaatcagtggttagctcttctgcccgaaaccctggttcgcgatcacctcgatgaaggtgccgaactgatgaagaccctgtgtaaacagaaacatccggtggtaaaacattgcaag

SEQ ID NO: 12 - protein, 383 aa, synthetic construct
  REGION 1..383: note = Wild type oxalate decarboxylase from Bacillus glycinifermentans
MEKNKQIPEPIRGEKGATTKIPHNIERDRQNPDMLVPPETDHGTVPNMKFSFSDVHNRLETGGYAREVTVRELPVSDNIASVNMRLKPGAIRELHWHKEAEWAYMLYGSARITSVDQDGKNFIEDVKEGDLWYFPSGLPHSIQALDEGCEFLLVFDDGSFSENSTFQVTDWLAHTPDDVIAANFGISEEIVAALPDEEKYIFQKAIPGSLENDKVDSPNGTVPESFSYRLLEQEPIASSGGKVWIADSTNFKASKTIAAALVEVEPGGMRELHWHPNTDEWQYYISGEAKMTVFASDGHARTFNYRAGDVGYVPFAMGHYVQNTGDKPLRFLEIFKDDHYADISLNQWLALLPETLVRDHLDEGAELMKTLCKQKHPVVKHCK

SEQ ID NO: 13 - DNA, 1170 bp, synthetic construct
  misc_feature 1..1170: note = Wild type oxalate decarboxylase from Bacillus atrophaeus
  source 1..1170: mol_type = other DNA
atgaagaaaattattcaacaaatgccgagcagccgtatcccacagcctattcgcggcgataaaggtgcgaccgacgacgggccgcgtaacctggaacgcgatcttcagaatccggatatgttggtgccaccagctacggatgcaggcatcgttgagaacctgaaattctcgttttctgacactcatatgcgtttagaacacggtggttgggcccgcgaagtcaccgtacgtgaactgccggcggccacgcagctggcagcggtgaatatgcgcctcaaacctggcggagttcgtgagctgcattggcacaaagaagctgaatggggctatgtgttgaacggtaaggtccgcatcacagcggtggatcagaaagggcgcaactttattgatgatgtaggagagggtgacctgtggtacttccccagtggcatcccgcattccattcagggcttagaagaagggtcggagtttctgctggttttcgatgatggcagcttttccgaaaattcaacctttagtgtcaccgactggttcgcccacactccgcgttctgtgcttgcagcaaattttggtatcccgggctatgaattggcgcatattcccgccaaagaacgctacatgttccaactgggtacgccgccgagcattaaccaggttaagatcgattcacctaatggtaccgtgccagagccgttctcgtataaactgacaaaacaggcgccgatcattactaacggcggaaaagtccgtattgctgacagcagtctctttaaagcgtccaagaccatcgccgccgctgtggtggaagtagaacctggcggtatgcgcgagatgcattggcacccaaacacggatgaatggcagtactacatttctgggaaagcgaagatgaccgtctttgcagcagaaggtaaagcccgtacgttcaactatcaagctggcgacgttggatatgttccgtttgcgatgggccattatatccagaataccggtagcaccgtgctgcgcttcttggaggtctttaaatccgatcgttttgaagatgtgtcgctgaatcaatggcttgcgttaacaccgcacggcttcgtacagcgcacgctgaacgttggtgcggcctttactgacgtgctgcagaaagagaaattccccgtcgtcaaatggaagtcagac

SEQ ID NO: 14 - protein, 390 aa, synthetic construct
  REGION 1..390: note = Wild type oxalate decarboxylase from Bacillus atrophaeus
MKKIIQQMPSSRIPQPIRGDKGATDDGPRNLERDLQNPDMLVPPATDAGIVENLKFSFSDTHMRLEHGGWAREVTVRELPAATQLAAVNMRLKPGGVRELHWHKEAEWGYVLNGKVRITAVDQKGRNFIDDVGEGDLWYFPSGIPHSIQGLEEGSEFLLVFDDGSFSENSTFSVTDWFAHTPRSVLAANFGIPGYELAHIPAKERYMFQLGTPPSINQVKIDSPNGTVPEPFSYKLTKQAPIITNGGKVRIADSSLFKASKTIAAAVVEVEPGGMREMHWHPNTDEWQYYISGKAKMTVFAAEGKARTFNYQAGDVGYVPFAMGHYIQNTGSTVLRFLEVFKSDRFEDVSLNQWLALTPHGFVQRTLNVGAAFTDVLQKEKFPVVKWKSD

SEQ ID NO: 15 - DNA, 1161 bp, synthetic construct
  misc_feature 1..1161: note = Wild type oxalate decarboxylase from Bacillus megaterium
  source 1..1161: mol_type = other DNA
atggaaagtcgtccgtcaaagaagaccaaatatggcgatattccacagcctatccgcgacgacggtgcgggagccactgatctgggtccgcgcgatatgatgcgtgacatggagaacccggatatgttagtgccacctgttacggatgcaggcctgattccgaatctcaaatttagcttctcggacacccatatgcaattgaaccacggtggttggtctcgtgaagtaacaatccgcgaactgccgattgctaccacgcttgcgggcgtcaatatgcgtctgactccaggaggagtgcgcgaactgcattggcatcagcaggctgaatgggcttacatgatcttaggccgcgcacgtattaccgttgtcgatcaagatggccgcaactttatcgccgacattgaagaaggtgatctgtggtatttcccgccgggcattcctcactccatccagggtttggaggaaggctgcgaatttctgctggtgttcgatgatggtagctttagcgacctcaatacgctgtcgatctccgattggtttgctcacaccccgaaagacgtacttgcgaagaattttggcgtcccgaagaatgcgtttaccaacattcctacataccagcgctatatctttcaagagcaggttcccggctctctggaaagccagaaagtcccagatccgtacggtacggtgccgaagaacctcacctataaactgctgagtcaagaaccgattgttactccaggcggatcagtccgtattgtggattcgacgaatttccccatcagcaccaacattgcagccgccttggttgagatcaaaccgggtggtatgcgtgagatgcattggcatcccaataatgacgaatggcagtattatcttactggcaaaggccgcatgaccgtattcgctggtaacggcaactcccgtacgtttaattaccgcgcgggagatgtgggttacgtgccgtttgcattcggccactatattgaaaacacaggcgacgaaagtctgtggtttttggaaatgttcaaaagcgatcgttttgcggacgtctcactgaatcaatggatggccttaacccctccggaactggttcaggataacctgcatgtgggtgtagagctcatggatgcacttcgcaaacagaaatggccagttgtc

SEQ ID NO: 16 - protein, 387 aa, synthetic construct
  REGION 1..387: note = Wild type oxalate decarboxylase from Bacillus megaterium
MESRPSKKTKYGDIPQPIRDDGAGATDLGPRDMMRDMENPDMLVPPVTDAGLIPNLKFSFSDTHMQLNHGGWSREVTIRELPIATTLAGVNMRLTPGGVRELHWHQQAEWAYMILGRARITVVDQDGRNFIADIEEGDLWYFPPGIPHSIQGLEEGCEFLLVFDDGSFSDLNTLSISDWFAHTPKDVLAKNFGVPKNAFTNIPTYQRYIFQEQVPGSLESQKVPDPYGTVPKNLTYKLLSQEPIVTPGGSVRIVDSTNFPISTNIAAALVEIKPGGMREMHWHPNNDEWQYYLTGKGRMTVFAGNGNSRTFNYRAGDVGYVPFAFGHYIENTGDESLWFLEMFKSDRFADVSLNQWMALTPPELVQDNLHVGVELMDALRKQKWPVV

SEQ ID NO: 17 - DNA, 1167 bp, synthetic construct
  misc_feature 1..1167: note = Wild type oxalate decarboxylase from Agrobacterium tumefaciens str. C58
  source 1..1167: mol_type = other DNA
atggcaagctttggtaatccggatcagccagctgaaggcgccattaacgcgaatgcggcagggctgtctgacccgggccctaaaaacccggccatcaacgatcaattcccgtcgtttcagtcacctccagctaccgatgtgggtgacatgcagttattctgggcgtcctttaataatgccgccaaacgcattcaaaacggaggatgggcacgtcaggttacgaagagcgatttcgctatcagtgatgcagtctctggcgtaaacatgcgtttgggtcccggtggtattcgcgagatgcattggcaccgtgctgctgaatgggccatcatgactaatggtcgctgccgcattaccgtgctggacccgcaagggcgtgcctatgttcaggatgtggaagcaggagacctgtggtactttccggccgggtatccacattcactccaaggtcttgggccggatggttgtgagtttgtaatcgtcttcgatgaaggagaccagtcggaatacggtacgctgctgctgacagattggcttgcacacaccagccccgagctgctcgccaagaactttggtgttgcacaggatgtgttccgcaacattccgttgcagaatctgtggatctttcaggggaaagaaccggggcctctgtccaaagaccaagaagctgtggcaggaaccggtttaccgccgttcccattcacgtataaattagctgccagcaaaccgctgaaagaaaatgccgccggtgtcattcgtttggctgatagttccgcatttactgtgtcgaagaccattgcagcagctatcgagacaattaaaccaggtggagttcgcgagatgcattggcatcctaacgccgacgaatggcagtactggattaaaggtgaagggcgtatgaccgtctttgatgcagggccgcgcagccagactgccgattttcgtgccggtgacatcgggtatgtaaaacgctctcaaggacacatcatcgaaaacaccggtaagacggatctgcagttcgtggccgttttcaaagctgctgaatatcaagaggtgagtctgagcagctggctcacgcataccccacccgcacttgttgcacagcacctgaacgtctcgattgaagatgtggccaaatttcctgctaatcaacctgccattatgcccgga

SEQ ID NO: 18 - protein, 389 aa, synthetic construct
  REGION 1..389: note = Wild type oxalate decarboxylase from Agrobacterium tumefaciens str. C58
MASFGNPDQPAEGAINANAAGLSDPGPKNPAINDQFPSFQSPPATDVGDMQLFWASFNNAAKRIQNGGWARQVTKSDFAISDAVSGVNMRLGPGGIREMHWHRAAEWAIMTNGRCRITVLDPQGRAYVQDVEAGDLWYFPAGYPHSLQGLGPDGCEFVIVFDEGDQSEYGTLLLTDWLAHTSPELLAKNFGVAQDVFRNIPLQNLWIFQGKEPGPLSKDQEAVAGTGLPPFPFTYKLAASKPLKENAAGVIRLADSSAFTVSKTIAAAIETIKPGGVREMHWHPNADEWQYWIKGEGRMTVFDAGPRSQTADFRAGDIGYVKRSQGHIIENTGKTDLQFVAVFKAAEYQEVSLSSWLTHTPPALVAQHLNVSIEDVAKFPANQPAIMPG

SEQ ID NO: 19 - DNA, 1167 bp, synthetic construct
  misc_feature 1..1167: note = Wild type oxalate decarboxylase from Rhizobiales bacterium
  source 1..1167: mol_type = other DNA
atggcaagctttggtaatccggatcgtccagctgaaggcgcggtgaacgcaaatccggcgggtctgaccgatacgggccctaagaacccgactttagccaaccagttcccctcctttgagagtccgccgcctaccgacgttggagaaatgcaactgttctggtcgtcgtttaataatgcgccaaaacgcattcagaacggtgggtgggctcgccaggtcacgaaatctgatttcgccatctcagacgccgtaagtggcgtgaacatgcgtcttggcccgggtggtgttcgcgagatgcattggcaccgtgcagcagaatgggctgtgatgacaaatggacgttgccgcgtcaccgttttggatgccaaaggccgtgcctatgtacaagatgtgggcgcaggtgacctgtggtactttcccgctggctttccgcattctctccagggactgggcccagaagggtgtgaattcgtcattgtgtttgatgaaggtgaccagagcgagtatgggaccctgctgttgactgattggcttgctcacacgccgccggaattattagccaagaacttcggcatgccagcagatgccttcaaatccatccctctcaacgacctctggatttttcaaggtcgcgaaccgggcccgttgtcagcagatcaggccagcgttgcttccgccggtcttccagagcatccctttacctttcgcttaggtgcaagcaaaccgatcaaagaaaatgcttcgggaatgttgcagatggccgacagcagcaccttcaaagtgagtaagacaattgcagcagccatcgaaacgattcaaccaggtgctgtacgtgaaatgcactggcatcctaacgccgatgagtggcagtactggctccaaggccagggccgcatgaccgtctttgatgctggccctcgttcacagactgccgactttcatgcaggcgatatcggctatgtgaagaaatctcaggggcacattattgaaaatacgggtaaaagcgacctcaaattcgttgccgtgttcaaagtcgctgagtaccaagaagtgggtcttaccagctggttatcgcatacaccgccgtctttggttgcacagcaccttaacatggaattgggcgatatcgaacgcattccgcgtgatcaaccgggaatcatgcccggt

SEQ ID NO: 20 - protein, 389 aa, synthetic construct
  REGION 1..389: note = Wild type oxalate decarboxylase from Rhizobiales bacterium
MASFGNPDRPAEGAVNANPAGLTDTGPKNPTLANQFPSFESPPPTDVGEMQLFWSSFNNAPKRIQNGGWARQVTKSDFAISDAVSGVNMRLGPGGVREMHWHRAAEWAVMTNGRCRVTVLDAKGRAYVQDVGAGDLWYFPAGFPHSLQGLGPEGCEFVIVFDEGDQSEYGTLLLTDWLAHTPPELLAKNFGMPADAFKSIPLNDLWIFQGREPGPLSADQASVASAGLPEHPFTFRLGASKPIKENASGMLQMADSSTFKVSKTIAAAIETIQPGAVREMHWHPNADEWQYWLQGQGRMTVFDAGPRSQTADFHAGDIGYVKKSQGHIIENTGKSDLKFVAVFKVAEYQEVGLTSWLSHTPPSLVAQHLNMELGDIERIPRDQPGIMPG

SEQ ID NO: 21 - DNA, 1179 bp, synthetic construct
  misc_feature 1..1179: note = Wild type oxalate decarboxylase from Hyphomicrobium sp. 802
  source 1..1179: mol_type = other DNA
atggcgacctttggtaatccggatcagccagcagaaggcgctattaacgccaaccctggaggactgagcgacccgggcccgaagaatcccatcatcaacagtcaattcccgtcgtttgagtctccaccacctacggatgtgggtggtatgccgttattctggggctcctttaataatgcgcagaaacgcattcagaacggtggttgggcgcgtcaactgactcaggccgacttcgcaatttcagaagctgttagcggcgtcaacatgcgtttgggcccgggcggagtacgcgagatgcattggcaccttgcagcagaatgggccatcatgaccaatggtcgctgccgtgtgacagttctggacccagaaggccatgcctatgtggatgatgtcggtccgggcgacctctggtactttccggctggctttccacacagtctgcaaggtctgggcccggatggtgccgaattcgtgttagtatttgacgaaggacgtcagagcgagtattccaccctgctggttacggattggttggctcatactccgccggatgtccttgcagcaaattttggcgtgcccaaagacgtgttcaagaacattcctctgcaggatctctggatctttcagggtaaagaaccgggcccactggctgccgatcaagcagctgttgcctctggaggtaccccgccgaatccctttacgttcaaattgggctcgtcgaaaccggtaaaagccaaccctagcggcgagttacgcatggccgactccagtatttttaaagcaagcaagaccatcgctgctgccatggaagtcctgaaaccaggtgcagttcgcgaaatgcactggcatcctaacgccgatgaatggcagtactggatggagggtgaaggccgtatgacagtgtttgatgcaggaccacatgctgttaccgccgactttcgccccggcgatgtgggttatgtcaagaaatctcaaggccacgtgattcagaatgtcggtaagacggacctgaaattcgtagccgtgttcaaagttcccgattaccaggaaatttcactgagcgactggctcacccatactccaccctcacttgtggcacaacacctgaacatcgatgtcgccgacatcgctaaatttcctagtgatgccccaggcattgttcctggtaaagtaccaggt

SEQ ID NO: 22 - protein, 393 aa, synthetic construct
  REGION 1..393: note = Wild type oxalate decarboxylase from Hyphomicrobium sp. 802
MATFGNPDQPAEGAINANPGGLSDPGPKNPIINSQFPSFESPPPTDVGGMPLFWGSFNNAQKRIQNGGWARQLTQADFAISEAVSGVNMRLGPGGVREMHWHLAAEWAIMTNGRCRVTVLDPEGHAYVDDVGPGDLWYFPAGFPHSLQGLGPDGAEFVLVFDEGRQSEYSTLLVTDWLAHTPPDVLAANFGVPKDVFKNIPLQDLWIFQGKEPGPLAADQAAVASGGTPPNPFTFKLGSSKPVKANPSGELRMADSSIFKASKTIAAAMEVLKPGAVREMHWHPNADEWQYWMEGEGRMTVFDAGPHAVTADFRPGDVGYVKKSQGHVIQNVGKTDLKFVAVFKVPDYQEISLSDWLTHTPPSLVAQHLNIDVADIAKFPSDAPGIVPGKVPG

SEQ ID NO: 23 - DNA, 1227 bp, synthetic construct
  misc_feature 1..1227: note = Wild type oxalate decarboxylase from Shinella sp.
  source 1..1227: mol_type = other DNA
atggaaaccaccagtcgtgctccagttccggcgaacggcacgattggtcgcactgccgatacagcaacctttgggaatcctgaccagccggcccaaggagctatcaacgcaaatggtgcaagcctggctgatccgggccccaaaaacccggtgattaatggtcagttcccatcgtttcagaaccctcctgccacggatatcggcgacatgcccttattctggggctcctttaataatgccgccaaacgcattcaaaacggtggttgggcacgtcaggtcaccaagtctgatttcgctatcgcagatgctgtgtcaggcgtaaacatgcgtctggggccgggcggaattcgcgagatgcattggcaccgtgcagcagaatgggccgttgttactaaaggacgttgccgcgtgacggtcttggacaccgaaggtcgcgcctatgtgcaggatgtaggtgccggcgacctgtggtactttccggctggctttccacattcattacaaggcctgtgtccggatggttgcgagttcgtcatcgtgtttgatgaaggagaccagtcggaatatggcacacttcttctgaccgattggctggcccacactccgccggaactcctggccaagaacttcggtatgccacgcgaggtgtttcgtaatattccgttgcatgacctgtggatcttccagggcaaagaaccgggcctgctgagcgaggatcaagaagctgttagtggtgcaggcttaccaccatacccgtttacgtatcgcttaaccgcatccaaacccctgaaacagaacgccgccggtacgattcagctcgcagatagccgtgtcttcgctgtatctaccaccattgcagcagctatcgaaacaattcgcccaggtgccgtgcgtgaaatgcactggcatcctaatgctgacgagtggcaatactggatcaaaggcgaaggacgcatgacggtctttgatgctggccctcgttcacgtaccgccgactttcatgccggtgatattggctatgttaagaaagcacagggtcacatcatcgaaaacactggagccagcgatttgcaatttgtggcagttttcaaagctgctgagtatcaggaagtgagtctgtcgtcttggcttacccatacgcctcccgcattagtagcacagcatctcaacgtctccctggaagatctgagccgctttccagccgatcgtccagccattatgcctggt

SEQ ID NO: 24 - protein, 409 aa, synthetic construct
  REGION 1..409: note = Wild type oxalate decarboxylase from Shinella sp.
METTSRAPVPANGTIGRTADTATFGNPDQPAQGAINANGASLADPGPKNPVINGQFPSFQNPPATDIGDMPLFWGSFNNAAKRIQNGGWARQVTKSDFAIADAVSGVNMRLGPGGIREMHWHRAAEWAVVTKGRCRVTVLDTEGRAYVQDVGAGDLWYFPAGFPHSLQGLCPDGCEFVIVFDEGDQSEYGTLLLTDWLAHTPPELLAKNFGMPREVFRNIPLHDLWIFQGKEPGLLSEDQEAVSGAGLPPYPFTYRLTASKPLKQNAAGTIQLADSRVFAVSTTIAAAIETIRPGAVREMHWHPNADEWQYWIKGEGRMTVFDAGPRSRTADFHAGDIGYVKKAQGHIIENTGASDLQFVAVFKAAEYQEVSLSSWLTHTPPALVAQHLNVSLEDLSRFPADRPAIMPG

SEQ ID NO: 25 - DNA, 1110 bp, synthetic construct
  misc_feature 1..1110: note = Wild type oxalate decarboxylase from Legionella maceachernii
  source 1..1110: mol_type = other DNA
atgactgaaacaacagcttctccaagtggcccggagaccacgaccgtgtcagcgaacccgaagattgagaaactgctgcaggaagaaagcaagaatatcgccgccgaatttccctatcgcattaacctcttcaaacaaggtcagatcgataagaatagcgcaggcgttcgtattgcagaaaccgcgaaccagttgttgtcgaataattccgggctgctgttctactacgaagtcgtcactgacgctatgcgcgtaccgcactggcatagtaacgcgaccgaaatcggtaccgttcttagcggcaagatgcgtgtgacgatttgggaaggagcgggtaacacgaagatgtataccgtagagaaaaatggcacgtggatcatcccgaaagccaaactgcattccttagagaacgttggtccggagaagatgaaatttctggtggtgtatgattcgcctattgcagcagatcgcgactttttaactgcgtgggcctctcttccagatgcgattctggctcgtgcggtagggctgaccgaaagcgacattgatggcatcaagaaaaccacggtcaaccgcctgtcagccttcgatccggcagcttcgccggagaaaggagacatgtactccgaactgagcaacaactttaagaccacaaaaccactctatcaatctgaattgggtagtattacgcgtgttgatagcaaagtaaatccgttaatcgatggcatggccctgcagcgcaccatcatgaaaccgggtgtgctgcgtattcctcactggtatacttcgggcgacgtccttctctttgtgctgaatggcgaagcgttcttcaccctgatgaatgatgatgggaaagtctaccatacgttagttcaccgcggtgacctgatttcaattccggtgggcaactttcattcctttttgaatgttggtaacgaagatctggaagtgtatgagggattcaaccgtactgacggcatcaatgaaatcacccttatgaacggtgtacagcattttaatctggggacgattcaaggtgcgacaggcctcagcaaagatgtcatcaagaagattcagcaggagaaacccgaatcttacatggtgaaattc

SEQ ID NO: 26 - protein, 370 aa, synthetic construct
  REGION 1..370: note = Wild type oxalate decarboxylase from Legionella maceachernii
MTETTASPSGPETTTVSANPKIEKLLQEESKNIAAEFPYRINLFKQGQIDKNSAGVRIAETANQLLSNNSGLLFYYEVVTDAMRVPHWHSNATEIGTVLSGKMRVTIWEGAGNTKMYTVEKNGTWIIPKAKLHSLENVGPEKMKFLVVYDSPIAADRDFLTAWASLPDAILARAVGLTESDIDGIKKTTVNRLSAFDPAASPEKGDMYSELSNNFKTTKPLYQSELGSITRVDSKVNPLIDGMALQRTIMKPGVLRIPHWYTSGDVLLFVLNGEAFFTLMNDDGKVYHTLVHRGDLISIPVGNFHSFLNVGNEDLEVYEGFNRTDGINEITLMNGVQHFNLGTIQGATGLSKDVIKKIQQEKPESYMVKF

SEQ ID NO: 27 - DNA, 1107 bp, synthetic construct
  misc_feature 1..1107: note = Variant of oxalate decarboxylase from Gemmata sp. SH-PL17
  source 1..1107: mol_type = other DNA
atgggtgatccgacctttatgaataatgtgccagaccatctgctggcggataaagatttgccgacgttcaagtttgccctggaaaagagcgagggcaaagtcattgggaaaagttcgggaaaagaagcaaccgttgttcagttacctatctccaaaggcattgctggtgtgagcatgactcttgaaccgggtgcgatgcgcgaattgcactggcatgccacagcagcagagtgggctttcgtattaaccggccacgtccgtacgacggtgatcgatccacaaggtgcggccgaaaccaacgactttggaccgggcgacgtgtggtattttcctcgcggtcatgggcacatgctggaatgcctgggcgataaaccggcgcatttcattctgatcttcgataacggctacttctcagagtttggcaccttctctattactgactggatcggtcacacaccgaaagcgcttctcgccaagaactttggtctgcccgaatcggcttttgatgggtttcccaaagacgaggtctattttgcacgtggcgcggttccaccagccacccctgcagcgcctttacagggacgcaaattgccaccactcacgcataaatacgaactcctcgaacagccgcctcataaagtattcaaaggtggtcgtgaatggcgcgtggatagcacccgttttcccatttccaagactgtaaccggcgttgttcttgatttggaacccggcgcgttacgcgagcttcactggcatcctaatgctgacgagtggcaatatgtgatcgatggcaacattagtgtgacgatgttcggttctcatggccgttaccgcaccgaacagatggagaaaggtgatgtcgggtatattccacaggggtatggccacagcatcgaaaatgtgggagatcgtccttgtcgcgtcttgattggctttaacacaggtaactacgaagccatcgacttatcacaatggattgcaggtaatcccgcggatgttcttgccacgaacttctccaaacccaccagcctctttgggaagttcccaaaacaggacgtgtttattgctcctggcaagggccaaactggccaccatcaccatcaccat

SEQ ID NO: 28 - protein, 369 aa, synthetic construct
  REGION 1..369: note = Variant of oxalate decarboxylase from Gemmata sp. SH-PL17
MGDPTFMNNVPDHLLADKDLPTFKFALEKSEGKVIGKSSGKEATVVQLPISKGIAGVSMTLEPGAMRELHWHATAAEWAFVLTGHVRTTVIDPQGAAETNDFGPGDVWYFPRGHGHMLECLGDKPAHFILIFDNGYFSEFGTFSITDWIGHTPKALLAKNFGLPESAFDGFPKDEVYFARGAVPPATPAAPLQGRKLPPLTHKYELLEQPPHKVFKGGREWRVDSTRFPISKTVTGVVLDLEPGALRELHWHPNADEWQYVIDGNISVTMFGSHGRYRTEQMEKGDVGYIPQGYGHSIENVGDRPCRVLIGFNTGNYEAIDLSQWIAGNPADVLATNFSKPTSLFGKFPKQDVFIAPGKGQTGHHHHHH

SEQ ID NO: 29 - DNA, 1107 bp, synthetic construct
  misc_feature 1..1107: note = Variant of oxalate decarboxylase from Gemmata sp. SH-PL17
  source 1..1107: mol_type = other DNA
atgggtgatccgacctttatgaataatgtgccagaccatctgctggcggataaagatttgccgacgttcaagtttgccctggaaaagagcgagggcaaagtcattgggaaaagttcgggaaaagaagcaaccgttgttcagttacctatctccaaaggcattgctggtgtgagcatgactcttgaaccgggtgcgatgcgcgaattgcactggcatgccacagcagcagagtgggctttcgtattaaccggccacgtccgtacgacggtgatcgatccacaaggtgcggccgaaaccaacgactttggaccgggcgacgtgtggtattttcctcgcggtcatgggcacatgctggaatgcctgggcgataaaccggcgcatttcattctgatcttcgataacggctacttctcagagtttggcaccttctctattactgactggatcggtcacacaccgaaagcgcttctcgccaagaactttggtctgcccgaatcggcttttgatgggtttcccaaagacgaggtctattttgcacgtggcgcggttccaccagccacccctgcagcgcctttacagggacgcaaattgccaccactcacgcataaatacgaactcctcgaacagccgcctcataaagtattcaaaggtggtcgtgaatggcgcgtggatagcacccgttttcccatttccaagactgtaaccggcgttgttcttgatttggaacccggcgcgttacgcgagcttcactggcatcctaatgctgacgagtggcaatatgtgatcgatggcaacattagtgtgacgatgttcggttctcatggccgttaccgcaccgaacagatggagaaaggtgatgtcgggtatattccacaggggtatggccacagcatcgaaaatgtgggagatcgtccttgtcgcgtcttgattggctttaacacaggtaactacgaagccatcgacttatcacaatggattgcaggtaatcccgcggatgttcttgccacgaacttctccaaacccaccagcctctttttgaagttcccaaaacaggacgtgtttattgctcctggcaagggccaaactggccaccatcaccatcaccat

SEQ ID NO: 30 - protein, 369 aa, synthetic construct
  REGION 1..369: note = Variant of oxalate decarboxylase from Gemmata sp. SH-PL17
MGDPTFMNNVPDHLLADKDLPTFKFALEKSEGKVIGKSSGKEATVVQLPISKGIAGVSMTLEPGAMRELHWHATAAEWAFVLTGHVRTTVIDPQGAAETNDFGPGDVWYFPRGHGHMLECLGDKPAHFILIFDNGYFSEFGTFSITDWIGHTPKALLAKNFGLPESAFDGFPKDEVYFARGAVPPATPAAPLQGRKLPPLTHKYELLEQPPHKVFKGGREWRVDSTRFPISKTVTGVVLDLEPGALRELHWHPNADEWQYVIDGNISVTMFGSHGRYRTEQMEKGDVGYIPQGYGHSIENVGDRPCRVLIGFNTGNYEAIDLSQWIAGNPADVLATNFSKPTSLFLKFPKQDVFIAPGKGQTGHHHHHH

SEQ ID NO: 31 - DNA, 1107 bp, synthetic construct
  misc_feature 1..1107: note = Variant of oxalate decarboxylase from Gemmata sp. SH-PL17
  source 1..1107: mol_type = other DNA
atgggtgatccgacctttatgaataatgtgccagaccatctgctggcggataaagatttgccgacgttcaagtttgccctggaaaagagcgagggcaaagtcattgggaaaagttcgggaaaagaagcaaccgttgttcagttacctatctccaaaggcattgctggtgtgagcatgactcttgaaccgggtgcgatgcgcgaattgcactggcatgccacagcagcagagtgggctttcgtattaaccggccacgtccgtacgacggtgatcgatccacaaggtgcggccgaaaccaacgactttggaccgggcgacgtgtggtattttcctcgcggtcatgggcacatgctggaatgcctgggcgatgggccggcgcatttcattctgatcttcgataacggctacttctcagagtttggcaccttctctattactgactggatcggtcacacaccgaaagcgcttctcgccaagaactttggtctgcccgaatcggcttttgatgggtttcccaaagacgaggtctattttgcacgtggcgcggttccaccagccacccctgcagcgcctttacagggacgcaaattgccaccactcacgcataaatacgaactcctcgaacagccgcctcataaagtattcaaaggtggtcgtgaatggcgcgtggatagcacccgttttcccatttccaagactgtaaccggcgttgttcttgatttggaacccggcgcgttacgcgagcttcactggcatcctaatgctgacgagtggcaatatgtgatcgatggcaacattagtgtgacgatgttcggttctcatggccgttaccgcaccgaacagatggagaaaggtgatgtcgggtatattccacaggggtatggccacagcatcgaaaatgtgggagatcgtccttgtcgcgtcttgattggctttaacacaggtaactacgaagccatcgacttatcacaatggattgcaggtaatcccgcggatgttcttgccacgaacttctccaaacccaccagcctctttgaaaagttcccaaaacaggacgtgtttattgctcctggcaagggccaaactggccaccatcaccatcaccat

SEQ ID NO: 32 - protein, 369 aa, synthetic construct
  REGION 1..369: note = Variant of oxalate decarboxylase from Gemmata sp. SH-PL17
MGDPTFMNNVPDHLLADKDLPTFKFALEKSEGKVIGKSSGKEATVVQLPISKGIAGVSMTLEPGAMRELHWHATAAEWAFVLTGHVRTTVIDPQGAAETNDFGPGDVWYFPRGHGHMLECLGDGPAHFILIFDNGYFSEFGTFSITDWIGHTPKALLAKNFGLPESAFDGFPKDEVYFARGAVPPATPAAPLQGRKLPPLTHKYELLEQPPHKVFKGGREWRVDSTRFPISKTVTGVVLDLEPGALRELHWHPNADEWQYVIDGNISVTMFGSHGRYRTEQMEKGDVGYIPQGYGHSIENVGDRPCRVLIGFNTGNYEAIDLSQWIAGNPADVLATNFSKPTSLFEKFPKQDVFIAPGKGQTGHHHHHH

SEQ ID NO: 33 - DNA, 1107 bp, synthetic construct
  misc_feature 1..1107: note = Variant of oxalate decarboxylase from Gemmata sp. SH-PL17
  source 1..1107: mol_type = other DNA
atgggtgatccgacctttatgaataatgtgccagaccatctgctggcggataaagatttgccgacgttcaagtttgccctggaaaagagcgagggcaaagtcattgggaaaagttcgggaaaagaagcaaccgttgttcagttacctatctccaaaggcattgctggtgtgagcatgactcttgaaccgggtgcgatgcgcgaattgcactggcatgccacagcagcagagtgggctttcgtattaaccggccacgtccgtacgacggtgatcgatccacaaggtgcggccgaaaccaacgactttggaccgggcgacgtgtggtattttcctcgcggtcatgggcacatgctggaatgcctgggcgatactccggcgcatttcattctgatcttcgataacggctacttctcagagtttggcaccttctctattactgactggatcggtcacacaccgaaagcgcttctcgccaagaactttggtctgcccgaatcggcttttgatgggtttcccaaagacgaggtctattttgcacgtggcgcggttccaccagccacccctgcagcgcctttacagggacgcaaattgccaccactcacgcataaatacgaactcctcgaacagccgcctcataaagtattcaaaggtggtcgtgaatggcgcgtggatagcacccgttttcccatttccaagactgtaaccggcgttgttcttgatttggaacccggcgcgttacgcgagcttcactggcatcctaatgctgacgagtggcaatatgtgatcgatggcaacattagtgtgacgatgttcggttctcatggccgttaccgcaccgaacagatggagaaaggtgatgtcgggtatattccacaggggtatggccacagcatcgaaaatgtgggagatcgtccttgtcgcgtcttgattggctttaacacaggtaactacgaagccatcgacttatcacaatggattgcaggtaatcccgcggatgttcttgccacgaacttctccaaacccaccagcctctttgaaaagttcccaaaacaggacgtgtttattgctcctggcaagggccaaactggccaccatcaccatcaccat

SEQ ID NO: 34 - protein, 369 aa, synthetic construct
  REGION 1..369: note = Variant of oxalate decarboxylase from Gemmata sp. SH-PL17
MGDPTFMNNVPDHLLADKDLPTFKFALEKSEGKVIGKSSGKEATVVQLPISKGIAGVSMTLEPGAMRELHWHATAAEWAFVLTGHVRTTVIDPQGAAETNDFGPGDVWYFPRGHGHMLECLGDTPAHFILIFDNGYFSEFGTFSITDWIGHTPKALLAKNFGLPESAFDGFPKDEVYFARGAVPPATPAAPLQGRKLPPLTHKYELLEQPPHKVFKGGREWRVDSTRFPISKTVTGVVLDLEPGALRELHWHPNADEWQYVIDGNISVTMFGSHGRYRTEQMEKGDVGYIPQGYGHSIENVGDRPCRVLIGFNTGNYEAIDLSQWIAGNPADVLATNFSKPTSLFEKFPKQDVFIAPGKGQTGHHHHHH

SEQ ID NO: 35 - DNA, 1107 bp, synthetic construct
  misc_feature 1..1107: note = Variant of oxalate decarboxylase from Gemmata sp. SH-PL17
  source 1..1107: mol_type = other DNA
atgggtgatccgacctttatgaataatgtgccagaccatctgctggcggataaagatttgccgacgttcaagtttgccctggaaaagagcgagggcaaagtcattgggaaaagttcgggaaaagaagcaaccgttgttcagttacctatctccaaaggcattgctggtgtgagcatgactcttgaaccgggtgcgatgcgcgaattgcactggcatgccacagcagcagagtgggctttcgtattaaccggccacgtccgtacgacggtgatcgatccacaaggtgcggccgaaaccaacgactttggaccgggcgacgtgtggtattttcctcgcggtcatgggcacatgctggaatgcctgggcgataaaccggcgcatttcattctgatcttcgataacggctacttctcagagtttggcaccttctctattactgactggatcggtcacacaccgaaagcgcttctcgccaagaactttggtctgcccgaatcggcttttgatgggtttcccaaagacgaggtctattttgcacgtggcgcggttccaccagccacccctgcagcgcctttacagggacgcaaattgccaccactcacgcataaatacgaactcctcgaacagccgcctcataaagtattcaaaggtggtcgtgaatggcgcgtggatagcacccgttttcccatttccaagactgtaaccggcgttgttcttgatttggaacccggcgcgttacgcgagcttcactggcatcctaatgctgacgagtggcaatatgtgatcgatggcaacattagtgtgacgatgttcggttctcatggccgttaccgcaccgaacagatggagaaaggtgatgtcgggtatattccacaggggtatggccacagcatcgaaaatgtgggagatcgtccttgtcgcgtcttgattggctttaacacaggtaactacgaagccatcgacttatcacaatggattgcaggtaatcccgcggatgttcttgccacgaacttctccaaacccaccagcctctttgaaaagttcccaaaacaggacgtgtttattgctcctggcttgggccaaactggccaccatcaccatcaccat

SEQ ID NO: 36 - protein, 369 aa, synthetic construct
  REGION 1..369: note = Variant of oxalate decarboxylase from Gemmata sp. SH-PL17
MGDPTFMNNVPDHLLADKDLPTFKFALEKSEGKVIGKSSGKEATVVQLPISKGIAGVSMTLEPGAMRELHWHATAAEWAFVLTGHVRTTVIDPQGAAETNDFGPGDVWYFPRGHGHMLECLGDKPAHFILIFDNGYFSEFGTFSITDWIGHTPKALLAKNFGLPESAFDGFPKDEVYFARGAVPPATPAAPLQGRKLPPLTHKYELLEQPPHKVFKGGREWRVDSTRFPISKTVTGVVLDLEPGALRELHWHPNADEWQYVIDGNISVTMFGSHGRYRTEQMEKGDVGYIPQGYGHSIENVGDRPCRVLIGFNTGNYEAIDLSQWIAGNPADVLATNFSKPTSLFEKFPKQDVFIAPGLGQTGHHHHHH

SEQ ID NO: 37 - DNA, 1107 bp, synthetic construct
  misc_feature 1..1107: note = Variant of oxalate decarboxylase from Gemmata sp. SH-PL17
  source 1..1107: mol_type = other DNA
atgggtgatccgacctttatgaataatgtgccagaccatctgctggcggataaagatttgccgacgttcaagtttgccctggaaaagagcgagggcaaagtcattgggaaaagttcgggaaaagaagcaaccgttgttcagttacctatctccaaaggcattgctggtgtgagcatgactcttgaaccgggtgcgatgcgcgaattgcactggcatgccacagcagcagagtgggctttcgtattaaccggccacgtccgtacgacggtgatcgatccacaaggtgcggccgaaaccaacgactttggaccgggcgacgtgtggtattttcctcgcggtcatgggcacatgctggaatgcctgggcgataaaccggcgcatttcattctgatcttcgataacggctacttctcagagtttggcaccttctctattactgactggatcggtcacacaccgaaagcgcttctcgccaagaactttggtctgcccgaatcggcttttgatgggtttcccaaaaaggaggtctattttgcacgtggcgcggttccaccagccacccctgcagcgcctttacagggacgcaaattgccaccactcacgcataaatacgaactcctcgaacagccgcctcataaagtattcaaaggtggtcgtgaatggcgcgtggatagcacccgttttcccatttccaagactgtaaccggcgttgttcttgatttggaacccggcgcgttacgcgagcttcactggcatcctaatgctgacgagtggcaatatgtgatcgatggcaacattagtgtgacgatgttcggttctcatggccgttaccgcaccgaacagatggagaaaggtgatgtcgggtatattccacaggggtatggccacagcatcgaaaatgtgggagatcgtccttgtcgcgtcttgattggctttaacacaggtaactacgaagccatcgacttatcacaatggattgcaggtaatcccgcggatgttcttgccacgaacttctccaaacccaccagcctctttgaaaagttcccaaaacaggacgtgtttattgctcctggcaagggccaaactggccaccatcaccatcaccat

SEQ ID NO: 38 - protein, 369 aa, synthetic construct
  REGION 1..369: note = Variant of oxalate decarboxylase from Gemmata sp. SH-PL17
MGDPTFMNNVPDHLLADKDLPTFKFALEKSEGKVIGKSSGKEATVVQLPISKGIAGVSMTLEPGAMRELHWHATAAEWAFVLTGHVRTTVIDPQGAAETNDFGPGDVWYFPRGHGHMLECLGDKPAHFILIFDNGYFSEFGTFSITDWIGHTPKALLAKNFGLPESAFDGFPKKEVYFARGAVPPATPAAPLQGRKLPPLTHKYELLEQPPHKVFKGGREWRVDSTRFPISKTVTGVVLDLEPGALRELHWHPNADEWQYVIDGNISVTMFGSHGRYRTEQMEKGDVGYIPQGYGHSIENVGDRPCRVLIGFNTGNYEAIDLSQWIAGNPADVLATNFSKPTSLFEKFPKQDVFIAPGKGQTGHHHHHH

SEQ ID NO: 39 - DNA, 1107 bp, synthetic construct
  misc_feature 1..1107: note = Variant of oxalate decarboxylase from Gemmata sp. SH-PL17
  source 1..1107: mol_type = other DNA
atgggtgatccgacctttatgaataatgtgccagaccatctgctggcggataaagatttgccgacgttcaagtttgccctggaaaagagcgagggcaaagtcattgggaaaagttcgggaaaagaagcaaccgttgttcagttacctatctccaaaggcattgctggtgtgagcatgactcttgaaccgggtgcgatgcgcgaattgcactggcatgccacagcagcagagtgggctttcgtattaaccggccacgtccgtacgacggtgatcgatccacaaggtgcggccgaaaccaacgactttggaccgggcgacgtgtggtattttcctcgcggtcatgggcacatgctggaatgcctgggcgataaaccggcgcatttcattctgatcttcgataacggctacttctcagagtttggcaccttctctattactgactggatcggtcacacaccgaaagcgcttctcgccaagaactttggtctgcccgaatcggcttttgatgggtttcccgttgacgaggtctattttgcacgtggcgcggttccaccagccacccctgcagcgcctttacagggacgcaaattgccaccactcacgcataaatacgaactcctcgaacagccgcctcataaagtattcaaaggtggtcgtgaatggcgcgtggatagcacccgttttcccatttccaagactgtaaccggcgttgttcttgatttggaacccggcgcgttacgcgagcttcactggcatcctaatgctgacgagtggcaatatgtgatcgatggcaacattagtgtgacgatgttcggttctcatggccgttaccgcaccgaacagatggagaaaggtgatgtcgggtatattccacaggggtatggccacagcatcgaaaatgtgggagatcgtccttgtcgcgtcttgattggctttaacacaggtaactacgaagccatcgacttatcacaatggattgcaggtaatcccgcggatgttcttgccacgaacttctccaaacccaccagcctctttgaaaagttcccaaaacaggacgtgtttattgctcctggcaagggccaaactggccaccatcaccatcaccat

SEQ ID NO: 40 - protein, 369 aa, synthetic construct
  REGION 1..369: note = Variant of oxalate decarboxylase from Gemmata sp. SH-PL17
MGDPTFMNNVPDHLLADKDLPTFKFALEKSEGKVIGKSSGKEATVVQLPISKGIAGVSMTLEPGAMRELHWHATAAEWAFVLTGHVRTTVIDPQGAAETNDFGPGDVWYFPRGHGHMLECLGDKPAHFILIFDNGYFSEFGTFSITDWIGHTPKALLAKNFGLPESAFDGFPVDEVYFARGAVPPATPAAPLQGRKLPPLTHKYELLEQPPHKVFKGGREWRVDSTRFPISKTVTGVVLDLEPGALRELHWHPNADEWQYVIDGNISVTMFGSHGRYRTEQMEKGDVGYIPQGYGHSIENVGDRPCRVLIGFNTGNYEAIDLSQWIAGNPADVLATNFSKPTSLFEKFPKQDVFIAPGKGQTGHHHHHH

SEQ ID NO: 41 - DNA, 1107 bp, synthetic construct
  misc_feature 1..1107: note = Variant of oxalate decarboxylase from Gemmata sp. SH-PL17
  source 1..1107: mol_type = other DNA
atgggtgatccgacctttatgaataatgtgccagaccatctgctggcggataaagatttgccgacgttcaagtttgccctggaaaagagcgagggcaaagtcattgggaaaagttcgggaaaagaagcaaccgttgttcagttacctatctccaaaggcattgctggtgtgagcatgactcttgaaccgggtgcgatgcgcgaattgcactggcatgccacagcagcagagtgggctttcgtattaaccggccacgtccgtacgacggtgatcgatccacaaggtgcggccgaaaccaacgactttggaccgggcgacgtgtggtattttcctcgcggtcatgggcacatgctggaatgcctgggccagaaaccggcgcatttcattctgatcttcgataacggctacttctcagagtttggcaccttctctattactgactggatcggtcacacaccgaaagcgcttctcgccaagaactttggtctgcccgaatcggcttttgatgggtttcccaaagacgaggtctattttgcacgtggcgcggttccaccagccacccctgcagcgcctttacagggacgcaaattgccaccactcacgcataaatacgaactcctcgaacagccgcctcataaagtattcaaaggtggtcgtgaatggcgcgtggatagcacccgttttcccatttccaagactgtaaccggcgttgttcttgatttggaacccggcgcgttacgcgagcttcactggcatcctaatgctgacgagtggcaatatgtgatcgatggcaacattagtgtgacgatgttcggttctcatggccgttaccgcaccgaacagatggagaaaggtgatgtcgggtatattccacaggggtatggccacagcatcgaaaatgtgggagatcgtccttgtcgcgtcttgattggctttaacacaggtaactacgaagccatcgacttatcacaatggattgcaggtaatcccgcggatgttcttgccacgaacttctccaaacccaccagcctctttgaaaagttcccaaaacaggacgtgtttattgctcctggcaagggccaaactggccaccatcaccatcaccat

SEQ ID NO: 42 - protein, 369 aa, synthetic construct
  REGION 1..369: note = Variant of oxalate decarboxylase from Gemmata sp. SH-PL17
MGDPTFMNNVPDHLLADKDLPTFKFALEKSEGKVIGKSSGKEATVVQLPISKGIAGVSMTLEPGAMRELHWHATAAEWAFVLTGHVRTTVIDPQGAAETNDFGPGDVWYFPRGHGHMLECLGQKPAHFILIFDNGYFSEFGTFSITDWIGHTPKALLAKNFGLPESAFDGFPKDEVYFARGAVPPATPAAPLQGRKLPPLTHKYELLEQPPHKVFKGGREWRVDSTRFPISKTVTGVVLDLEPGALRELHWHPNADEWQYVIDGNISVTMFGSHGRYRTEQMEKGDVGYIPQGYGHSIENVGDRPCRVLIGFNTGNYEAIDLSQWIAGNPADVLATNFSKPTSLFEKFPKQDVFIAPGKGQTGHHHHHH

SEQ ID NO: 43 - DNA, 1107 bp, synthetic construct
  misc_feature 1..1107: note = Variant of oxalate decarboxylase from Gemmata sp. SH-PL17
  source 1..1107: mol_type = other DNA
atgggtgatccgacctttatgaataatgtgccagaccatctgctggcggataaagatttgccgacgttcaagtttgccctggaaaagagcgagggcaaagtcattgggaaaagttcgggaaaagaagcaaccgttgttcagttacctatctccaaaggcattgctggtgtgagcatgactcttgaaccgggtgcgatgcgcgaattgcactggcatgccacagcagcagagtgggctttcgtattaaccggccacgtccgtacgacggtgatcgatccacaaggtgcggccgaaaccaacgactttggaccgggcgacgtgtggtattttcctcgcggtcatgggcacatgctggaatgcctgggcgataaaccggcgcatttcattctgatcttcgataacggctacttctcagagtttggcaccttctctattactgactggatcggtcacacaccgaaagcgcttctcgccaagaactttggtctgcccgaatcggcttttgatgggtttcccaaagacgaggtctattttgcacgtggcgcggttccaccagccacccctgcagcgcctttacagggacgctttttgccaccactcacgcataaatacgaactcctcgaacagccgcctcataaagtattcaaaggtggtcgtgaatggcgcgtggatagcacccgttttcccatttccaagactgtaaccggcgttgttcttgatttggaacccggcgcgttacgcgagcttcactggcatcctaatgctgacgagtggcaatatgtgatcgatggcaacattagtgtgacgatgttcggttctcatggccgttaccgcaccgaacagatggagaaaggtgatgtcgggtatattccacaggggtatggccacagcatcgaaaatgtgggagatcgtccttgtcgcgtcttgattggctttaacacaggtaactacgaagccatcgacttatcacaatggattgcaggtaatcccgcggatgttcttgccacgaacttctccaaacccaccagcctctttgaaaagttcccaaaacaggacgtgtttattgctcctggcaagggccaaactggccaccatcaccatcaccat

SEQ ID NO: 44 - protein, 369 aa, synthetic construct
  REGION 1..369: note = Variant of oxalate decarboxylase from Gemmata sp. SH-PL17
MGDPTFMNNVPDHLLADKDLPTFKFALEKSEGKVIGKSSGKEATVVQLPISKGIAGVSMTLEPGAMRELHWHATAAEWAFVLTGHVRTTVIDPQGAAETNDFGPGDVWYFPRGHGHMLECLGDKPAHFILIFDNGYFSEFGTFSITDWIGHTPKALLAKNFGLPESAFDGFPKDEVYFARGAVPPATPAAPLQGRFLPPLTHKYELLEQPPHKVFKGGREWRVDSTRFPISKTVTGVVLDLEPGALRELHWHPNADEWQYVIDGNISVTMFGSHGRYRTEQMEKGDVGYIPQGYGHSIENVGDRPCRVLIGFNTGNYEAIDLSQWIAGNPADVLATNFSKPTSLFEKFPKQDVFIAPGKGQTGHHHHHH

SEQ ID NO: 45 - DNA, 1107 bp, synthetic construct
  misc_feature 1..1107: note = Variant of oxalate decarboxylase from Gemmata sp. SH-PL17
  source 1..1107: mol_type = other DNA
atgggtgatccgacctttatgaataatgtgccagaccatctgctggcggataaagatttgccgacgttcaagtttgccctggaaaagagcgagggcaaagtcattgggaaaagttcgggaaaagaagcaaccgttgttcagttacctatctccaaaggcattgctggtgtgagcatgactcttgaaccgggtgcgatgcgcgaattgcactggcatgccacagcagcagagtgggctttcgtattaaccggccacgtccgtacgacggtgatcgatccacaaggtgcggccgaaaccaacgactttggaccgggcgacgtgtggtattttcctcgcggtcatgggcacatgctggaatgcctgggcgataaaccggcgcatttcattctgatcttcgataacggctacttctcagagtttggcaccttctctattactgactggatcggtcacacaccgaaagcgcttctcgccaagaactttggtctgcccgaatcggcttttgatgggtttcccaaagacgaggtctattttgcacgtggcgcggttccaccagccacccctgcagcgcctttacagggacgcaaattgccaccactcacgcataaatacgaactcctcgaacagccgcctcataaagtattcaaaggtggtcgtgaatggcgcgtggatagcacccgttttcccatttccaagactgtaaccggcgttgttcttgatttggaacccggcgcgttacgcgagcttcactggcatcctaatgctgacgagtggcaatatgtgatcgatggcaacattagtgtgacgatgttcggttctcatggccgttaccgcaccgaacagatggagaaaggtgatgtcgggtatattccacaggggtatggccacagcatcgaaaatgtgggagatgatccttgtcgcgtcttgattggctttaacacaggtaactacgaagccatcgacttatcacaatggattgcaggtaatcccgcggatgttcttgccacgaacttctccaaacccaccagcctctttgaaaagttcccaaaacaggacgtgtttattgctcctggcaagggccaaactggccaccatcaccatcaccat

SEQ ID NO: 46 - protein, 369 aa, synthetic construct
  REGION 1..369: note = Variant of oxalate decarboxylase from Gemmata sp. SH-PL17
MGDPTFMNNVPDHLLADKDLPTFKFALEKSEGKVIGKSSGKEATVVQLPISKGIAGVSMTLEPGAMRELHWHATAAEWAFVLTGHVRTTVIDPQGAAETNDFGPGDVWYFPRGHGHMLECLGDKPAHFILIFDNGYFSEFGTFSITDWIGHTPKALLAKNFGLPESAFDGFPKDEVYFARGAVPPATPAAPLQGRKLPPLTHKYELLEQPPHKVFKGGREWRVDSTRFPISKTVTGVVLDLEPGALRELHWHPNADEWQYVIDGNISVTMFGSHGRYRTEQMEKGDVGYIPQGYGHSIENVGDDPCRVLIGFNTGNYEAIDLSQWIAGNPADVLATNFSKPTSLFEKFPKQDVFIAPGKGQTGHHHHHH

SEQ ID NO: 47 - DNA, 1107 bp, synthetic construct
  misc_feature 1..1107: note = Variant of oxalate decarboxylase from Gemmata sp. SH-PL17
  source 1..1107: mol_type = other DNA
atgggtgatccgacctttatgaataatgtgccagaccatctgctggcggataaagatttgccgacgttcaagtttgccctggaaaagagcgagggcaaagtcattgggaaaagttcgggaaaagaagcaaccgttgttcagttacctatctccaaaggcattgctggtgtgagcatgactcttgaaccgggtgcgatgcgcgaattgcactggcatgccacagcagcagagtgggctttcgtattaaccggccacgtccgtacgacggtgatcgatccacaaggtgcggccgaaaccaacgactttggaccgggcgacgtgtggtattttcctcgcggtcatgggcacatgctggaatgcctgggcgataaaccggcgcatttcattctgatcttcgataacggctacttctcagagtttggcaccttctctattactgactggatcggtcacacaccgaaagcgcttctcgccaagaactttggtctgcccgaatcggcttttgatgggtttcccaaagacgaggtctattttgcacgtggcgcggttccaccagccacccctgcagcgcctttacagggacgcaaattgccaccactcacgcataaatacgaactcctcgaacagccgcctcataaagtattcaaaggtggtcgtgaatggcgcgtggatagcacccgttttcccatttccaagactgtaaccggcgttgttcttgatttggaacccggcgcgttacgcgagcttcactggcatcctaatgctgacgagtggcaatatgtgatcgatggcaacattagtgtgacgatgttcggttctcatggccgttaccgcaccgaacagatggagaaaggtgatgtcgggtatattccacaggggtatggccacagcatcgaaaatcagggagatcgtccttgtcgcgtcttgattggctttaacacaggtaactacgaagccatcgacttatcacaatggattgcaggtaatcccgcggatgttcttgccacgaacttctccaaacccaccagcctctttgaaaagttcccaaaacaggacgtgtttattgctcctggcaagggccaaactggccaccatcaccatcaccat

SEQ ID NO: 48 - protein, 369 aa, synthetic construct
  REGION 1..369: note = Variant of oxalate decarboxylase from Gemmata sp. SH-PL17
MGDPTFMNNVPDHLLADKDLPTFKFALEKSEGKVIGKSSGKEATVVQLPISKGIAGVSMTLEPGAMRELHWHATAAEWAFVLTGHVRTTVIDPQGAAETNDFGPGDVWYFPRGHGHMLECLGDKPAHFILIFDNGYFSEFGTFSITDWIGHTPKALLAKNFGLPESAFDGFPKDEVYFARGAVPPATPAAPLQGRKLPPLTHKYELLEQPPHKVFKGGREWRVDSTRFPISKTVTGVVLDLEPGALRELHWHPNADEWQYVIDGNISVTMFGSHGRYRTEQMEKGDVGYIPQGYGHSIENQGDRPCRVLIGFNTGNYEAIDLSQWIAGNPADVLATNFSKPTSLFEKFPKQDVFIAPGKGQTGHHHHHH

SEQ ID NO: 49 - DNA, 1107 bp, synthetic construct
  misc_feature 1..1107: note = Variant of oxalate decarboxylase from Gemmata sp. SH-PL17
  source 1..1107: mol_type = other DNA
atgggtgatccgacctttatgaataatgtgccagaccatctgctggcggataaagatttgccgacgttcaagtttgccctggaaaagagcgagggcaaagtcattgggaaaagttcgggaaaagaagcaaccgttgttcagttacctatctccaaaggcattgctggtgtgagcatgactcttgaaccgggtgcgatgcgcgaattgcactggcatgccacagcagcagagtgggctttcgtattaaccggccacgtccgtacgacggtgatcgatccacaaggtgcggccgaaaccaacgactttggaccgggcgacgtgtggtattttcctcgcggtcatgggcacatgctggaatgcctgggcgataaaccggcgcatttcattctgatcttcgataacggctacttctcagagtttggcaccttctctattactgactggatcggtcacacaccgaaagcgcttctcgccaagaactttggtctgcccgaatcggcttttgatgggtttcccaaagacgaggtctattttgcacgtggcgcggttccaccagccacccctgcagcgcctttacagggacgcaaattgccaccactcacgcataaatacgaactcctcgaacagccgcctcataaagtattcaaaggtggtcgtgaatggcgcgtggatagcacccgttttcccatttccaagactgtaaccggcgttgttcttgatttggaacccggcgcgttacgcgagcttcactggcatcctaatgctgacgagtggcaatatgtgatcgatggcaacattagtgtgacgatgttcggttctcatggccgttaccgcaccgaacagatggagaaaggtgatgtcgggtatattccacaggggtatggccacagcatcgaaaatgtgggagatcgtccttgtcgcgtcttgattggctttaacacaggtaactacgaagccatcgacttatcacaatggattgcaggtaatcccgcggatgttcttgccacgaacttctccaaacccaccagcctctttgaatttttcccaaaacaggacgtgtttattgctcctggcaagggccaaactggccaccatcaccatcaccat

SEQ ID NO: 50 - protein, 369 aa, synthetic construct
  REGION 1..369: note = Variant of oxalate decarboxylase from Gemmata sp. SH-PL17
MGDPTFMNNVPDHLLADKDLPTFKFALEKSEGKVIGKSSGKEATVVQLPISKGIAGVSMTLEPGAMRELHWHATAAEWAFVLTGHVRTTVIDPQGAAETNDFGPGDVWYFPRGHGHMLECLGDKPAHFILIFDNGYFSEFGTFSITDWIGHTPKALLAKNFGLPESAFDGFPKDEVYFARGAVPPATPAAPLQGRKLPPLTHKYELLEQPPHKVFKGGREWRVDSTRFPISKTVTGVVLDLEPGALRELHWHPNADEWQYVIDGNISVTMFGSHGRYRTEQMEKGDVGYIPQGYGHSIENVGDRPCRVLIGFNTGNYEAIDLSQWIAGNPADVLATNFSKPTSLFEFFPKQDVFIAPGKGQTGHHHHHH

SEQ ID NO: 51 - DNA, 1107 bp, synthetic construct
  misc_feature 1..1107: note = Variant of oxalate decarboxylase from Gemmata sp. SH-PL17
  source 1..1107: mol_type = other DNA
atgggtgatccgacctttatgaataatgtgccagaccatctgctggcggataaagatttgccgacgttcaagtttgccctggaaaagagcgagggcaaagtcattgggaaaagttcgggaaaagaagcaaccgttgttcagttacctatctccaaaggcattgctggtgtgagcatgactcttgaaccgggtgcgatgcgcgaattgcactggcatgccacagcagcagagtgggctttcgtattaaccggccacgtccgtacgacggtgatcgatccacaaggtgcggccgaaaccaacgactttggaccgggcgacgtgtggtattttcctcgcggtcatgggcacatgctggaatgcctgggcgataaaccggcgcatttcattctgatcttcgataacggctacttctcagagtttggcaccttctctattactgactggatcggtcacacaccgaaagcgcttctcgccaagaactttggtctgcccgaatcggcttttgatgggtttcccaaagacgaggtctattttgcacgtggcgcggttccaccagccacccctgcagcgcctttacagggacgcaaattgccaccactcacgcataaatacgaactcctcgaacagccgcctcataaagtattcaaaggtggtcgtgaatggcgcgtggatagcacccgttttcccatttccaagactgtaaccggcgttgttcttgatttggaacccggcgcgttacgcgagcttcactggcatcctaatgctgacgagtggcaatatgtgatcgatggcaacattagtgtgacgatgttcggttctcatggccgttaccgcaccgaacagatggagaaaggtgatgtcgggtatattccacaggggtatggccacagcatcgaaaatgtgggagatcgtccttgtcgcgtcttgattggctttaacacaggtaactacgaagccatcgacttatcacaatggattgcaggtaatcccgcggatgttcttgccacgaacttctccaaacccaccagcctctttgaaaagttcccaaaacaggacgtgtttattgctcctggctggggccaaactggccaccatcaccatcaccat

SEQ ID NO: 52 - protein, 369 aa, synthetic construct
  REGION 1..369: note = Variant of oxalate decarboxylase from Gemmata sp. SH-PL17
MGDPTFMNNVPDHLLADKDLPTFKFALEKSEGKVIGKSSGKEATVVQLPISKGIAGVSMTLEPGAMRELHWHATAAEWAFVLTGHVRTTVIDPQGAAETNDFGPGDVWYFPRGHGHMLECLGDKPAHFILIFDNGYFSEFGTFSITDWIGHTPKALLAKNFGLPESAFDGFPKDEVYFARGAVPPATPAAPLQGRKLPPLTHKYELLEQPPHKVFKGGREWRVDSTRFPISKTVTGVVLDLEPGALRELHWHPNADEWQYVIDGNISVTMFGSHGRYRTEQMEKGDVGYIPQGYGHSIENVGDRPCRVLIGFNTGNYEAIDLSQWIAGNPADVLATNFSKPTSLFEKFPKQDVFIAPGWGQTGHHHHHH

SEQ ID NO: 53 - DNA, 1107 bp, synthetic construct
  misc_feature 1..1107: note = Variant of oxalate decarboxylase from Gemmata sp. SH-PL17
  source 1..1107: mol_type = other DNA
atgggtgatccgacctttatgaataatgtgccagaccatctgctggcggataaagatttgccgacgttcaagtttgccctggaaaagagcgagggcaaagtcattgggaaaagttcgggaaaagaagcaaccgttgttcagttacctatctccaaaggcattgctggtgtgagcatgactcttgaaccgggtgcgatgcgcgaattgcactggcatgccacagcagcagagtgggctttcgtattaaccggccacgtccgtacgacggtgatcgatccacaaggtgcggccgaaaccaacgactttggaccgggcgacgtgtggtattttcctcgcggtcatgggcacatgctggaatgcctgggcgatcagccggcgcatttcattctgatcttcgataacggctacttctcagagtttggcaccttctctattactgactggatcggtcacacaccgaaagcgcttctcgccaagaactttggtctgcccgaatcggcttttgatgggtttcccaaagacgaggtctattttgcacgtggcgcggttccaccagccacccctgcagcgcctttacagggacgcaaattgccaccactcacgcataaatacgaactcctcgaacagccgcctcataaagtattcaaaggtggtcgtgaatggcgcgtggatagcacccgttttcccatttccaagactgtaaccggcgttgttcttgatttggaacccggcgcgttacgcgagcttcactggcatcctaatgctgacgagtggcaatatgtgatcgatggcaacattagtgtgacgatgttcggttctcatggccgttaccgcaccgaacagatggagaaaggtgatgtcgggtatattccacaggggtatggccacagcatcgaaaatgtgggagatcgtccttgtcgcgtcttgattggctttaacacaggtaactacgaagccatcgacttatcacaatggattgcaggtaatcccgcggatgttcttgccacgaacttctccaaacccaccagcctctttgaaaagttcccaaaacaggacgtgtttattgctcctggcaagggccaaactggccaccatcaccatcaccat

SEQ ID NO: 54 - protein, 369 aa, synthetic construct
  REGION 1..369: note = Variant of oxalate decarboxylase from Gemmata sp. SH-PL17
MGDPTFMNNVPDHLLADKDLPTFKFALEKSEGKVIGKSSGKEATVVQLPISKGIAGVSMTLEPGAMRELHWHATAAEWAFVLTGHVRTTVIDPQGAAETNDFGPGDVWYFPRGHGHMLECLGDQPAHFILIFDNGYFSEFGTFSITDWIGHTPKALLAKNFGLPESAFDGFPKDEVYFARGAVPPATPAAPLQGRKLPPLTHKYELLEQPPHKVFKGGREWRVDSTRFPISKTVTGVVLDLEPGALRELHWHPNADEWQYVIDGNISVTMFGSHGRYRTEQMEKGDVGYIPQGYGHSIENVGDRPCRVLIGFNTGNYEAIDLSQWIAGNPADVLATNFSKPTSLFEKFPKQDVFIAPGKGQTGHHHHHH

SEQ ID NO: 55 - DNA, 1107 bp, synthetic construct
  misc_feature 1..1107: note = Variant of oxalate decarboxylase from Gemmata sp. SH-PL17
  source 1..1107: mol_type = other DNA
atgggtgatccgacctttatgaataatgtgccagaccatctgctggcggataaagatttgccgacgttcaagtttgccctggaaaagagcgagggcaaagtcattgggaaaagttcgggaaaagaagcaaccgttgttcagttacctatctccaaaggcattgctggtgtgagcatgactcttgaaccgggtgcgatgcgcgaattgcactggcatgccacagcagcagagtgggctttcgtattaaccggccacgtccgtacgacggtgatcgatccacaaggtgcggccgaaaccaacgactttggaccgggcgacgtgtggtattttcctcgcggtcatgggcacatgctggaatgcctgggcgatgctccggcgcatttcattctgatcttcgataacggctacttctcagagtttggcaccttctctattactgactggatcggtcacacaccgaaagcgcttctcgccaagaactttggtctgcccgaatcggcttttgatgggtttcccaaagacgaggtctattttgcacgtggcgcggttccaccagccacccctgcagcgcctttacagggacgcaaattgccaccactcacgcataaatacgaactcctcgaacagccgcctcataaagtattcaaaggtggtcgtgaatggcgcgtggatagcacccgttttcccatttccaagactgtaaccggcgttgttcttgatttggaacccggcgcgttacgcgagcttcactggcatcctaatgctgacgagtggcaatatgtgatcgatggcaacattagtgtgacgatgttcggttctcatggccgttaccgcaccgaacagatggagaaaggtgatgtcgggtatattccacaggggtatggccacagcatcgaaaatgtgggagatcgtccttgtcgcgtcttgattggctttaacacaggtaactacgaagccatcgacttatcacaatggattgcaggtaatcccgcggatgttcttgccacgaacttctccaaacccaccagcctctttgaaaagttcccaaaacaggacgtgtttattgctcctggcaagggccaaactggccaccatcaccatcaccat

SEQ ID NO: 56 - protein, 369 aa, synthetic construct
  REGION 1..369: note = Variant of oxalate decarboxylase from Gemmata sp. SH-PL17
MGDPTFMNNVPDHLLADKDLPTFKFALEKSEGKVIGKSSGKEATVVQLPISKGIAGVSMTLEPGAMRELHWHATAAEWAFVLTGHVRTTVIDPQGAAETNDFGPGDVWYFPRGHGHMLECLGDAPAHFILIFDNGYFSEFGTFSITDWIGHTPKALLAKNFGLPESAFDGFPKDEVYFARGAVPPATPAAPLQGRKLPPLTHKYELLEQPPHKVFKGGREWRVDSTRFPISKTVTGVVLDLEPGALRELHWHPNADEWQYVIDGNISVTMFGSHGRYRTEQMEKGDVGYIPQGYGHSIENVGDRPCRVLIGFNTGNYEAIDLSQWIAGNPADVLATNFSKPTSLFEKFPKQDVFIAPGKGQTGHHHHHH

SEQ ID NO: 57 - DNA, 1107 bp, synthetic construct
  misc_feature 1..1107: note = Variant of oxalate decarboxylase from Gemmata sp. SH-PL17
  source 1..1107: mol_type = other DNA
atgggtgatccgacctttatgaataatgtgcgtgaccatctgctggcggataaagatttgccgacgttcaagtttgccctggaaaagagcgagggcaaagtcattgggaaaagttcgggaaaagaagcaaccgttgttcagttacctatctccaaaggcattgctggtgtgagcatgactcttgaaccgggtgcgatgcgcgaattgcactggcatgccacagcagcagagtgggctttcgtattaaccggccacgtccgtacgacggtgatcgatccacaaggtgcggccgaaaccaacgactttggaccgggcgacgtgtggtattttcctcgcggtcatgggcacatgctggaatgcctgggcgataaaccggcgcatttcattctgatcttcgataacggctacttctcagagtttggcaccttctctattactgactggatcggtcacacaccgaaagcgcttctcgccaagaactttggtctgcccgaatcggcttttgatgggtttcccaaagacgaggtctattttgcacgtggcgcggttccaccagccacccctgcagcgcctttacagggacgcaaattgccaccactcacgcataaatacgaactcctcgaacagccgcctcataaagtattcaaaggtggtcgtgaatggcgcgtggatagcacccgttttcccatttccaagactgtaaccggcgttgttcttgatttggaacccggcgcgttacgcgagcttcactggcatcctaatgctgacgagtggcaatatgtgatcgatggcaacattagtgtgacgatgttcggttctcatggccgttaccgcaccgaacagatggagaaaggtgatgtcgggtatattccacaggggtatggccacagcatcgaaaatgtgggagatcgtccttgtcgcgtcttgattggctttaacacaggtaactacgaagccatcgacttatcacaatggattgcaggtaatcccgcggatgttcttgccacgaacttctccaaacccaccagcctctttgaaaagttcccaaaacaggacgtgtttattgctcctggcaagggccaaactggccaccatcaccatcaccat

SEQ ID NO: 58 - protein, 369 aa, synthetic construct
  REGION 1..369: note = Variant of oxalate decarboxylase from Gemmata sp. SH-PL17
MGDPTFMNNVRDHLLADKDLPTFKFALEKSEGKVIGKSSGKEATVVQLPISKGIAGVSMTLEPGAMRELHWHATAAEWAFVLTGHVRTTVIDPQGAAETNDFGPGDVWYFPRGHGHMLECLGDKPAHFILIFDNGYFSEFGTFSITDWIGHTPKALLAKNFGLPESAFDGFPKDEVYFARGAVPPATPAAPLQGRKLPPLTHKYELLEQPPHKVFKGGREWRVDSTRFPISKTVTGVVLDLEPGALRELHWHPNADEWQYVIDGNISVTMFGSHGRYRTEQMEKGDVGYIPQGYGHSIENVGDRPCRVLIGFNTGNYEAIDLSQWIAGNPADVLATNFSKPTSLFEKFPKQDVFIAPGKGQTGHHHHHH

SEQ ID NO: 59 - DNA, 1107 bp, synthetic construct
  misc_feature 1..1107: note = Variant of oxalate decarboxylase from Gemmata sp. SH-PL17
  source 1..1107: mol_type = other DNA
atgggtgatccgacctttatgaataatgtgccagaccatctgctggcggataaagatttgccgacgttcaagtttgccctggaaaagagcgagggcaaagtcattgggaaaagttcgggaaaagaagcaaccgttgttcagttacctatctccaaaggcattgctggtgtgagcatgactcttgaaccgggtgcgatgcgcgaattgcactggcatgccacagcagcagagtgggctttcgtattaaccggccacgtccgtacgacggtgatcgatccacaaggtgcggccgaaaccaacgactttggaccgggcgacgtgtggtattttcctcgcggtcatgggcacatgctggaatgcctgggcgataaaccggcgcatttcattctgatcttcgataacggctacttctcagagtttggcaccttctctattactgactggatcggtcacacaccgaaagcgcttctcgccaagaactttggtctgcccgaatcggcttttgatgggtttcccaaagacgaggtctattttgcacgtggcgcggttccaccagccacccctgcagcgcctttacagggacgcaaattgccaccactcacgcataaatacgaactcctcgaacagccgcctcataaagtattcaaaggtggtcgtgaatggcgcgtggatagcacccgttttcccatttccaagactgtaaccggcgttgttcttgatttggaacccggcgcgttacgcgagcttcactggcatcctaatgctgacgagtggcaatatgtgatcgatggcaacattagtgtgacgatgttcggttctcatggccgttaccgcaccgaacagatggagcggggtgatgtcgggtatattccacaggggtatggccacagcatcgaaaatgtgggagatcgtccttgtcgcgtcttgattggctttaacacaggtaactacgaagccatcgacttatcacaatggattgcaggtaatcccgcggatgttcttgccacgaacttctccaaacccaccagcctctttgaaaagttcccaaaacaggacgtgtttattgctcctggcaagggccaaactggccaccatcaccatcaccat

SEQ ID NO: 60 - protein, 369 aa, synthetic construct
  REGION 1..369: note = Variant of oxalate decarboxylase from Gemmata sp. SH-PL17
MGDPTFMNNVPDHLLADKDLPTFKFALEKSEGKVIGKSSGKEATVVQLPISKGIAGVSMTLEPGAMRELHWHATAAEWAFVLTGHVRTTVIDPQGAAETNDFGPGDVWYFPRGHGHMLECLGDKPAHFILIFDNGYFSEFGTFSITDWIGHTPKALLAKNFGLPESAFDGFPKDEVYFARGAVPPATPAAPLQGRKLPPLTHKYELLEQPPHKVFKGGREWRVDSTRFPISKTVTGVVLDLEPGALRELHWHPNADEWQYVIDGNISVTMFGSHGRYRTEQMERGDVGYIPQGYGHSIENVGDRPCRVLIGFNTGNYEAIDLSQWIAGNPADVLATNFSKPTSLFEKFPKQDVFIAPGKGQTGHHHHHH

SEQ ID NO: 61 - DNA, 1107 bp, synthetic construct
  misc_feature 1..1107: note = Variant of oxalate decarboxylase from Gemmata sp. SH-PL17
  source 1..1107: mol_type = other DNA
atgggtgatccgacctttatgaataatgtgccagaccatctgctggcggataaagatttgccgacgttcaagtttgccctggaaaagagcgagggcaaagtcattgggaaaagttcgggaaaagaagcaaccgttgttcagttacctatctccaaaggcattgctggtgtgagcatgactcttgaaccgggtgcgatgcgcgaattgcactggcatgccacagcagcagagtgggctttcgtattaaccggccacgtccgtacgacggtgatcgatccacaaggtgcggccgaaaccaacgactttggaccgggcgacgtgtggtattttcctcgcggtcatgggcacatgctggaatgcctgggcgataaaccggcgcatttcattctgatcttcgataacggctacttctcagagtttggcaccttctctattactgactggatcggtcacacaccgaaagcgcttctcgccaagaactttggtctgcccgaatcggcttttgatgggtttcccaaagacgaggtctattttgcacgtggcgcggttccaccagccacccctgcagcgcctttacagggacgcaaattgccaccactcacgcataaatacgaactcctcgaacagttgcctcataaagtattcaaaggtggtcgtgaatggcgcgtggatagcacccgttttcccatttccaagactgtaaccggcgttgttcttgatttggaacccggcgcgttacgcgagcttcactggcatcctaatgctgacgagtggcaatatgtgatcgatggcaacattagtgtgacgatgttcggttctcatggccgttaccgcaccgaacagatggagaaaggtgatgtcgggtatattccacaggggtatggccacagcatcgaaaatgtgggagatcgtccttgtcgcgtcttgattggctttaacacaggtaactacgaagccatcgacttatcacaatggattgcaggtaatcccgcggatgttcttgccacgaacttctccaaacccaccagcctctttgaaaagttcccaaaacaggacgtgtttattgctcctggcaagggccaaactggccaccatcaccatcaccat

SEQ ID NO: 62 - protein, 369 aa, synthetic construct
  REGION 1..369: note = Variant of oxalate decarboxylase from Gemmata sp. SH-PL17
MGDPTFMNNVPDHLLADKDLPTFKFALEKSEGKVIGKSSGKEATVVQLPISKGIAGVSMTLEPGAMRELHWHATAAEWAFVLTGHVRTTVIDPQGAAETNDFGPGDVWYFPRGHGHMLECLGDKPAHFILIFDNGYFSEFGTFSITDWIGHTPKALLAKNFGLPESAFDGFPKDEVYFARGAVPPATPAAPLQGRKLPPLTHKYELLEQLPHKVFKGGREWRVDSTRFPISKTVTGVVLDLEPGALRELHWHPNADEWQYVIDGNISVTMFGSHGRYRTEQMEKGDVGYIPQGYGHSIENVGDRPCRVLIGFNTGNYEAIDLSQWIAGNPADVLATNFSKPTSLFEKFPKQDVFIAPGKGQTGHHHHHH

SEQ ID NO: 63 - DNA, 1107 bp, synthetic construct
  misc_feature 1..1107: note = Variant of oxalate decarboxylase from Gemmata sp. SH-PL17
  source 1..1107: mol_type = other DNA
atgggtgatccgacctttatgaataatgtgccagaccatctgctggcggataaagatttgccgacgttcaagtttgccctggaaaagagcgagggcaaagtcattgggaaaagttcgggaaaagaagcaaccgttgttcagttacctatctccaaaggcattgctggtgtgagcatgactcttgaaccgggtgcgatgcgcgaattgcactggcatgccacagcagcagagtgggctttcgtattaaccggccacgtccgtacgacggtgatcgatccacaaggtgcggccgaaaccaacgactttggaccgggcgacgtgtggtattttcctcgcggtcatgggcacatgctggaatgcctgggcgataaaccggcgcatttcattctgatcttcgataacggctacttctcagagtttggcaccttctctattactgactggatcggtcacacaccgaaagcgcttctcgccaagaactttggtctgcccgaatcggcttttttggggtttcccaaagacgaggtctattttgcacgtggcgcggttccaccagccacccctgcagcgcctttacagggacgcaaattgccaccactcacgcataaatacgaactcctcgaacagccgcctcataaagtattcaaaggtggtcgtgaatggcgcgtggatagcacccgttttcccatttccaagactgtaaccggcgttgttcttgatttggaacccggcgcgttacgcgagcttcactggcatcctaatgctgacgagtggcaatatgtgatcgatggcaacattagtgtgacgatgttcggttctcatggccgttaccgcaccgaacagatggagaaaggtgatgtcgggtatattccacaggggtatggccacagcatcgaaaatgtgggagatcgtccttgtcgcgtcttgattggctttaacacaggtaactacgaagccatcgacttatcacaatggattgcaggtaatcccgcggatgttcttgccacgaacttctccaaacccaccagcctctttgaaaagttcccaaaacaggacgtgtttattgctcctggcaagggccaaactggccaccatcaccatcaccat

SEQ ID NO: 64 - protein, 369 aa, synthetic construct
  REGION 1..369: note = Variant of oxalate decarboxylase from Gemmata sp. SH-PL17
MGDPTFMNNVPDHLLADKDLPTFKFALEKSEGKVIGKSSGKEATVVQLPISKGIAGVSMTLEPGAMRELHWHATAAEWAFVLTGHVRTTVIDPQGAAETNDFGPGDVWYFPRGHGHMLECLGDKPAHFILIFDNGYFSEFGTFSITDWIGHTPKALLAKNFGLPESAFLGFPKDEVYFARGAVPPATPAAPLQGRKLPPLTHKYELLEQPPHKVFKGGREWRVDSTRFPISKTVTGVVLDLEPGALRELHWHPNADEWQYVIDGNISVTMFGSHGRYRTEQMEKGDVGYIPQGYGHSIENVGDRPCRVLIGFNTGNYEAIDLSQWIAGNPADVLATNFSKPTSLFEKFPKQDVFIAPGKGQTGHHHHHH

SEQ ID NO: 65 - DNA, 1107 bp, synthetic construct
  misc_feature 1..1107: note = Variant of oxalate decarboxylase from Gemmata sp. SH-PL17
  source 1..1107: mol_type = other DNA
atgggtgatccgacctttatgaataatgtgccagaccatctgctggcggataaagatttgccgacgttcaagtttgccctggaaaagagcgagggcaaagtcattgggaaaagttcgggaaaagaagcaaccgttgttcagttacctatctccaaaggcattgctggtgtgagcatgactcttgaaccgggtgcgatgcgcgaattgcactggcatgccacagcagcagagtgggctttcgtattaaccggccacgtccgtacgacggtgatcgatccacaaggtgcggccgaaaccaacgactttggaccgggcgacgtgtggtattttcctcgcggtcatgggcacatgctggaatgcctgggcgataaaccggcgcatttcattctgatcttcgataacggctacttctcagagtttggcaccttctctattactgactggatcggtcacacaccgaaagcgcttctcgccaagaactttggtctgcccgaatcggcttttgatgggtttcccaaagacgaggtctattttgcacgtggcgcggttccaccagccacccctgcagcgcctttacagggacgcaaattgccaccactcacgcataaatacgaactcctcgaacagccgcctcataaagtattcaaaggtggtcgtgaatggcgcgtggatagcacccgttttcccatttccaagactgtaaccggcgttgttcttgatttggaacccggcgcgttacgcgagcttcactggcatcctaatgctgacgagtggcaatatgtgatcgatggcaacattagtgtgacgatgttcggttctcatggccgttaccgcaccgaacagatggagaaaggtgatgtcgggtatattccacaggggtatggccacagcatcgaaaatgtgggagatgggccttgtcgcgtcttgattggctttaacacaggtaactacgaagccatcgacttatcacaatggattgcaggtaatcccgcggatgttcttgccacgaacttctccaaacccaccagcctctttgaaaagttcccaaaacaggacgtgtttattgctcctggcaagggccaaactggccaccatcaccatcaccat

SEQ ID NO: 66 - protein, 369 aa, synthetic construct
  REGION 1..369: note = Variant of oxalate decarboxylase from Gemmata sp. SH-PL17
MGDPTFMNNVPDHLLADKDLPTFKFALEKSEGKVIGKSSGKEATVVQLPISKGIAGVSMTLEPGAMRELHWHATAAEWAFVLTGHVRTTVIDPQGAAETNDFGPGDVWYFPRGHGHMLECLGDKPAHFILIFDNGYFSEFGTFSITDWIGHTPKALLAKNFGLPESAFDGFPKDEVYFARGAVPPATPAAPLQGRKLPPLTHKYELLEQPPHKVFKGGREWRVDSTRFPISKTVTGVVLDLEPGALRELHWHPNADEWQYVIDGNISVTMFGSHGRYRTEQMEKGDVGYIPQGYGHSIENVGDGPCRVLIGFNTGNYEAIDLSQWIAGNPADVLATNFSKPTSLFEKFPKQDVFIAPGKGQTGHHHHHH

SEQ ID NO: 67 - DNA, 1107 bp, synthetic construct
  misc_feature 1..1107: note = Variant of oxalate decarboxylase from Gemmata sp. SH-PL17
  source 1..1107: mol_type = other DNA
atgggtgatccgacctttatgaataatgtgccagaccatctgctggcggataaagatttgccgacgttcaagtttgccctggaaaagagcgagggcaaagtcattgggaaaagttcgggaaaagaagcaaccgttgttcagttacctatctccaaaggcattgctggtgtgagcatgactcttgaaccgggtgcgatgcgcgaattgcactggcatgccacagcagcagagtgggctttcgtattaaccggccacgtccgtacgacggtgatcgatccacaaggtgcggccgaaaccaacgactttggaccgggcgacgtgtggtattttcctcgcggtcatgggcacatgctggaatgcctgggcgataaaccggcgcatttcattctgatcttcgataacggctacttctcagagtttggcaccttctctattactgactggatcggtcacacaccgaaagcgcttctcgccaagaactttggtctgcccgaatcggcttttgatgggtttcccaaagacgaggtctattttgcacgtggcgcggttccaccagccacccctgcagcgcctttacagggacgcaaattgccaccactcacgcataaatacgaactcctcgaacagccgcctcataaagtattctggggtggtcgtgaatggcgcgtggatagcacccgttttcccatttccaagactgtaaccggcgttgttcttgatttggaacccggcgcgttacgcgagcttcactggcatcctaatgctgacgagtggcaatatgtgatcgatggcaacattagtgtgacgatgttcggttctcatggccgttaccgcaccgaacagatggagaaaggtgatgtcgggtatattccacaggggtatggccacagcatcgaaaatgtgggagatcgtccttgtcgcgtcttgattggctttaacacaggtaactacgaagccatcgacttatcacaatggattgcaggtaatcccgcggatgttcttgccacgaacttctccaaacccaccagcctctttgaaaagttcccaaaacaggacgtgtttattgctcctggcaagggccaaactggccaccatcaccatcaccat

SEQ ID NO: 68 - protein, 369 aa, synthetic construct
  REGION 1..369: note = Variant of oxalate decarboxylase from Gemmata sp. SH-PL17
MGDPTFMNNVPDHLLADKDLPTFKFALEKSEGKVIGKSSGKEATVVQLPISKGIAGVSMTLEPGAMRELHWHATAAEWAFVLTGHVRTTVIDPQGAAETNDFGPGDVWYFPRGHGHMLECLGDKPAHFILIFDNGYFSEFGTFSITDWIGHTPKALLAKNFGLPESAFDGFPKDEVYFARGAVPPATPAAPLQGRKLPPLTHKYELLEQPPHKVFWGGREWRVDSTRFPISKTVTGVVLDLEPGALRELHWHPNADEWQYVIDGNISVTMFGSHGRYRTEQMEKGDVGYIPQGYGHSIENVGDRPCRVLIGFNTGNYEAIDLSQWIAGNPADVLATNFSKPTSLFEKFPKQDVFIAPGKGQTGHHHHHH

SEQ ID NO: 69 - DNA, 1107 bp, synthetic construct
  misc_feature 1..1107: note = Variant of oxalate decarboxylase from Gemmata sp. SH-PL17
  source 1..1107: mol_type = other DNA
atgggtgatccgacctttatgaataatgtgccagaccatctgctggcggataaagatttgccgacgttcaagtttgccctggaaaagagcgagggcaaagtcattgggaaaagttcgggaaaagaagcaaccgttgttcagttacctatctccaaaggcattgctggtgtgagcatgactcttgaaccgggtgcgatgcgcgaattgcactggcatgccacagcagcagagtgggctttcgtattaaccggccacgtccgtacgacggtgatcgatccacaaggtgcggccgaaaccaacgactttggaccgggcgacgtgtggtattttcctcgcggtcatgggcacatgctggaatgcctgggcgataaaccggcgcatttcattctgatcttcgataacggctacttctcagagtttggcaccttctctattactgactggatcggtcacacaccgaaagcgcttctcgccaagaactttggtctgcccgaatcggcttttgatgggtttcccaaagacgaggtctattttgcacgtggcgcggttccaccagccacccctgcagcgcctttacagggacgcaaattgccaccactcacgcataaatacgaactcctcgaacagccgcctcataaagtattcaaaggtggtcgtgaatggcgcgtggatagcacccgttttcccatttccaagactgtaaccggcgttgttcttgatttggaacccggcgcgttacgcgagcttcactggcatcctaatgctgacgagtggcaatatgtgatcgatggcaacattagtgtgacgatgttcggttctcatggccgttaccgcaccgaacagatggagaaaggtgatgtcgggtatattccacaggggtatggccacagcatcgaaaatgtgggagatcgtccttgtcgcgtcttgattggctttaacacaggtaactacgaagccatcgacttatcacaatggattgcaggtaatcccgcggatgttcttgccacgaacttctccaaacccaccagcctctttgaaaggttcccaaaacaggacgtgtttattgctcctggcaagggccaaactggccaccatcaccatcaccat

SEQ ID NO: 70 - protein, 369 aa, synthetic construct
  REGION 1..369: note = Variant of oxalate decarboxylase from Gemmata sp. SH-PL17
MGDPTFMNNVPDHLLADKDLPTFKFALEKSEGKVIGKSSGKEATVVQLPISKGIAGVSMTLEPGAMRELHWHATAAEWAFVLTGHVRTTVIDPQGAAETNDFGPGDVWYFPRGHGHMLECLGDKPAHFILIFDNGYFSEFGTFSITDWIGHTPKALLAKNFGLPESAFDGFPKDEVYFARGAVPPATPAAPLQGRKLPPLTHKYELLEQPPHKVFKGGREWRVDSTRFPISKTVTGVVLDLEPGALRELHWHPNADEWQYVIDGNISVTMFGSHGRYRTEQMEKGDVGYIPQGYGHSIENVGDRPCRVLIGFNTGNYEAIDLSQWIAGNPADVLATNFSKPTSLFERFPKQDVFIAPGKGQTGHHHHHH

SEQ ID NO: 71 - DNA, 1107 bp, synthetic construct
  misc_feature 1..1107: note = Variant of oxalate decarboxylase from Gemmata sp. SH-PL17
  source 1..1107: mol_type = other DNA
atgggtgatccgacctttatgaataatgtgccagaccatctgctggcggataaagatttgccgacgttcaagtttgccctggaaaagagcgagggcaaagtcattgggaaaagttcgggaaaagaagcaaccgttgttcagttacctatctccaaaggcattgctggtgtgagcatgactcttgaaccgggtgcgatgcgcgaattgcactggcatgccacagcagcagagtgggctttcgtattaaccggccacgtccgtacgacggtgatcgatccacaaggtgcggccgaaaccaacgactttggaccgggcgacgtgtggtattttcctcgcggtcatgggcacatgctggaatgcctgggcgataaaccggcgcatttcattctgatcttcgataacggctacttctcagagtttggcaccttctctattactgactggatcggtcacacaccgaaagcgcttctcgccaagaactttggtctgcccgaatcggcttttgatgggtttcccaaagacgaggtctattttgcacgtggcgcggttccaccagccacccctgcagcgcctttacagggacgcgtgttgccaccactcacgcataaatacgaactcctcgaacagccgcctcataaagtattcaaaggtggtcgtgaatggcgcgtggatagcacccgttttcccatttccaagactgtaaccggcgttgttcttgatttggaacccggcgcgttacgcgagcttcactggcatcctaatgctgacgagtggcaatatgtgatcgatggcaacattagtgtgacgatgttcggttctcatggccgttaccgcaccgaacagatggagaaaggtgatgtcgggtatattccacaggggtatggccacagcatcgaaaatgtgggagatcgtccttgtcgcgtcttgattggctttaacacaggtaactacgaagccatcgacttatcacaatggattgcaggtaatcccgcggatgttcttgccacgaacttctccaaacccaccagcctctttgaaaagttcccaaaacaggacgtgtttattgctcctggcaagggccaaactggccaccatcaccatcaccat

SEQ ID NO: 72 - protein, 369 aa, synthetic construct
  REGION 1..369: note = Variant of oxalate decarboxylase from Gemmata sp. SH-PL17
MGDPTFMNNVPDHLLADKDLPTFKFALEKSEGKVIGKSSGKEATVVQLPISKGIAGVSMTLEPGAMRELHWHATAAEWAFVLTGHVRTTVIDPQGAAETNDFGPGDVWYFPRGHGHMLECLGDKPAHFILIFDNGYFSEFGTFSITDWIGHTPKALLAKNFGLPESAFDGFPKDEVYFARGAVPPATPAAPLQGRVLPPLTHKYELLEQPPHKVFKGGREWRVDSTRFPISKTVTGVVLDLEPGALRELHWHPNADEWQYVIDGNISVTMFGSHGRYRTEQMEKGDVGYIPQGYGHSIENVGDRPCRVLIGFNTGNYEAIDLSQWIAGNPADVLATNFSKPTSLFEKFPKQDVFIAPGKGQTGHHHHHH

SEQ ID NO: 73 - DNA, 1107 bp, synthetic construct
  misc_feature 1..1107: note = Variant of oxalate decarboxylase from Gemmata sp. SH-PL17
  source 1..1107: mol_type = other DNA
atgggtgatccgacctttatgaataatgtgccagaccatctgctggcggataaagatttgccgacgttcaagtttgccctggaaaagagcgagggcaaagtcattgggaaaagttcgggaaaagaagcaaccgttgttcagttacctatctccaaaggcattgctggtgtgagcatgactcttgaaccgggtgcgatgcgcgaattgcactggcatgccacagcagcagagtgggctttcgtattaaccggccacgtccgtacgacggtgatcgatccacaaggtgcggccgaaaccaacgactttggaccgggcgacgtgtggtattttcctcgcggtcatgggcacatgctggaatgcctgggcgataaaccggcgcatttcattctgatcttcgataacggctacttctcagagtttggcaccttctctattactgactggatcggtcacacaccgaaagcgcttctcgccaagaactttggtctgcccgaatcggcttttgatgggtttcccaaagacgaggtctattttgcacgtggcgcggttccaccagccacccctgcagcgcctttacagggacgcaaattgccaccactcacgcataaatacgaactcctcgaacagccgcctcataaagtattcaaaggtggtcgtgaatggcgcgtggatagcacccgttttcccatttccaagactgtaaccggcgttgttcttgatttggaacccggcgcgttacgcgagcttcactggcatcctaatgctgacgagtggcaatatgtgatcgatggcaacattagtgtgacgatgttcggttctcatggccgttaccgcaccgaacagatggaggcgggtgatgtcgggtatattccacaggggtatggccacagcatcgaaaatgtgggagatcgtccttgtcgcgtcttgattggctttaacacaggtaactacgaagccatcgacttatcacaatggattgcaggtaatcccgcggatgttcttgccacgaacttctccaaacccaccagcctctttgaaaagttcccaaaacaggacgtgtttattgctcctggcaagggccaaactggccaccatcaccatcaccat

SEQ ID NO: 74 - protein, 369 aa, synthetic construct
  REGION 1..369: note = Variant of oxalate decarboxylase from Gemmata sp. SH-PL17
MGDPTFMNNVPDHLLADKDLPTFKFALEKSEGKVIGKSSGKEATVVQLPISKGIAGVSMTLEPGAMRELHWHATAAEWAFVLTGHVRTTVIDPQGAAETNDFGPGDVWYFPRGHGHMLECLGDKPAHFILIFDNGYFSEFGTFSITDWIGHTPKALLAKNFGLPESAFDGFPKDEVYFARGAVPPATPAAPLQGRKLPPLTHKYELLEQPPHKVFKGGREWRVDSTRFPISKTVTGVVLDLEPGALRELHWHPNADEWQYVIDGNISVTMFGSHGRYRTEQMEAGDVGYIPQGYGHSIENVGDRPCRVLIGFNTGNYEAIDLSQWIAGNPADVLATNFSKPTSLFEKFPKQDVFIAPGKGQTGHHHHHH

SEQ ID NO: 75 - DNA, 1107 bp, synthetic construct
  misc_feature 1..1107: note = Variant of oxalate decarboxylase from Gemmata sp. SH-PL17
  source 1..1107: mol_type = other DNA
atgggtgatccgacctttatgaataatgtgccagaccatctgctggcggataaagatttgccgacgttcaagtttgccctggaaaagagcgagggcaaagtcattgggaaaagttcgggaaaagaagcaaccgttgttcagttacctatctccaaaggcattgctggtgtgagcatgactcttgaaccgggtgcgatgcgcgaattgcactggcatgccacagcagcagagtgggctttcgtattaaccggccacgtccgtacgacggtgatcgatccacaaggtgcggccgaaaccaacgactttggaccgggcgacgtgtggtattttcctcgcggtcatgggcacatgctggaatgcctgggcgataaaccggcgcatttcattctgatcttcgataacggctacttctcagagtttggcaccttctctattactgactggatcggtcacacaccgaaagcgcttctcgccaagaactttggtctgcccgaatcggcttttgatgggtttcccaaagacgaggtctattttgcacgtggcgcggttccaccagccacccctgcagcgcctttacagggacttaaattgccaccactcacgcataaatacgaactcctcgaacagccgcctcataaagtattcaaaggtggtcgtgaatggcgcgtggatagcacccgttttcccatttccaagactgtaaccggcgttgttcttgatttggaacccggcgcgttacgcgagcttcactggcatcctaatgctgacgagtggcaatatgtgatcgatggcaacattagtgtgacgatgttcggttctcatggccgttaccgcaccgaacagatggagaaaggtgatgtcgggtatattccacaggggtatggccacagcatcgaaaatgtgggagatcgtccttgtcgcgtcttgattggctttaacacaggtaactacgaagccatcgacttatcacaatggattgcaggtaatcccgcggatgttcttgccacgaacttctccaaacccaccagcctctttgaaaagttcccaaaacaggacgtgtttattgctcctggcaagggccaaactggccaccatcaccatcaccat

SEQ ID NO: 76 - protein, 369 aa, synthetic construct
  REGION 1..369: note = Variant of oxalate decarboxylase from Gemmata sp. SH-PL17
MGDPTFMNNVPDHLLADKDLPTFKFALEKSEGKVIGKSSGKEATVVQLPISKGIAGVSMTLEPGAMRELHWHATAAEWAFVLTGHVRTTVIDPQGAAETNDFGPGDVWYFPRGHGHMLECLGDKPAHFILIFDNGYFSEFGTFSITDWIGHTPKALLAKNFGLPESAFDGFPKDEVYFARGAVPPATPAAPLQGLKLPPLTHKYELLEQPPHKVFKGGREWRVDSTRFPISKTVTGVVLDLEPGALRELHWHPNADEWQYVIDGNISVTMFGSHGRYRTEQMEKGDVGYIPQGYGHSIENVGDRPCRVLIGFNTGNYEAIDLSQWIAGNPADVLATNFSKPTSLFEKFPKQDVFIAPGKGQTGHHHHHH

SEQ ID NO: 77 - DNA, 1107 bp, synthetic construct
  misc_feature 1..1107: note = Variant of oxalate decarboxylase from Gemmata sp. SH-PL17
  source 1..1107: mol_type = other DNA
atgggtgatccgacctttatgaataatgtgccagaccatctgctggcggataaagatttgccgacgttcaagtttgccctggaaaagagcgagggcaaagtcattgggaaaagttcgggaaaagaagcaaccgttgttcagttacctatctccaaaggcattgctggtgtgagcatgactcttgaaccgggtgcgatgcgcgaattgcactggcatgccacagcagcagagtgggctttcgtattaaccggccacgtccgtacgacggtgatcgatccacaaggtgcggccgaaaccaacgactttggaccgggcgacgtgtggtattttcctcgcggtcatgggcacatgctggaatgcctgggcgataaaccagcgcatttcattctgatcttcgataacggctacttctcagagtttggcaccttctctattactgactggatcggtcacacaccgaaagcgcttctcgccaagaactttggtctgcccgaatcggcttttgatgggtttcccaaagacgaggtctattttgcacgtggcgcggttccaccagccacccctgcagcgcctttacagggacgcaaattgccaccactcacgcataaatacgaactcctcgaacagccgcctcataaagtattcaaaggtggtcgtgaatggcgcgtggatagcacccgttttcccatttccaagactgtaaccggcgttgttcttgatttggaacccggcgcgttacgcgagcttcactggcatcctaatgctgacgagtggcaatatgtgatcgatggcaacattagtgtgacgatgttcggttctcatggccgttaccgcaccgaacagatggagaaaggtgatgtcgggtatattccacaggggtatggccacagcatcgaaaatgtgggagatcgtccttgtcgcgtcttgattggctttaacacaggtaactacgaagccatcgacttatcacaatggattgcaggtaatcccgcggatgttcttgccacgaacttcggtaaacccaccagcctctttgaaaagttcccaaaacaggacgtgtttattgctcctggcaagggccaaactggccaccatcaccatcaccat

SEQ ID NO: 78 - protein, 369 aa, synthetic construct
  REGION 1..369: note = Variant of oxalate decarboxylase from Gemmata sp. SH-PL17
MGDPTFMNNVPDHLLADKDLPTFKFALEKSEGKVIGKSSGKEATVVQLPISKGIAGVSMTLEPGAMRELHWHATAAEWAFVLTGHVRTTVIDPQGAAETNDFGPGDVWYFPRGHGHMLECLGDKPAHFILIFDNGYFSEFGTFSITDWIGHTPKALLAKNFGLPESAFDGFPKDEVYFARGAVPPATPAAPLQGRKLPPLTHKYELLEQPPHKVFKGGREWRVDSTRFPISKTVTGVVLDLEPGALRELHWHPNADEWQYVIDGNISVTMFGSHGRYRTEQMEKGDVGYIPQGYGHSIENVGDRPCRVLIGFNTGNYEAIDLSQWIAGNPADVLATNFGKPTSLFEKFPKQDVFIAPGKGQTGHHHHHH

SEQ ID NO: 79 - DNA, 1107 bp, synthetic construct
  misc_feature 1..1107: note = Variant of oxalate decarboxylase from Gemmata sp. SH-PL17
  source 1..1107: mol_type = other DNA
atgggtgattctacctttatgaataatgtgccagaccatctgctggcggataaagatttgccgacgttcaagtttgccctggaaaagagcgagggcaaagtcattgggaaaagttcgggaaaagaagcaaccgttgttcagttacctatctccaaaggcattgctggtgtgagcatgactcttgaaccgggtgcgatgcgcgaattgcactggcatgccacagcagcagagtgggctttcgtattaaccggccacgtccgtacgacggtgatcgatccacaaggtgcggccgaaaccaacgactttggaccgggcgacgtgtggtattttcctcgcggtcatgggcacatgctggaatgcctgggcgataaaccggcgcatttcattctgatcttcgataacggctacttctcagagtttggcaccttctctattactgactggatcggtcacacaccgaaagcgcttctcgccaagaactttggtctgcccgaatcggcttttgatgggtttcccaaagacgaggtctattttgcacgtggcgcggttccaccagccacccctgcagcgcctttacagggacgcaaattgccaccactcacgcataaatacgaactcctcgaacagccgcctcataaagtattcaaaggtggtcgtgaatggcgcgtggatagcacccgttttcccatttccaagactgtaaccggcgttgttcttgatttggaacccggcgcgttacgcgagcttcactggcatcctaatgctgacgagtggcaatatgtgatcgatggcaacattagtgtgacgatgttcggttctcatggccgttaccgcaccgaacagatggagaaaggtgatgtcgggtatattccacaggggtatggccacagcatcgaaaatgtgggagatcgtccttgtcgcgtcttgattggctttaacacaggtaactacgaagccatcgacttatcacaatggattgcaggtaatcccgcggatgttcttgccacgaacttctccaaacccaccagcctctttgaaaagttcccaaaacaggacgtgtttattgctcctggcaagggccaaactggccaccatcaccatcaccat

SEQ ID NO: 80 - protein, 369 aa, synthetic construct
  REGION 1..369: note = Variant of oxalate decarboxylase from Gemmata sp. SH-PL17
MGDSTFMNNVPDHLLADKDLPTFKFALEKSEGKVIGKSSGKEATVVQLPISKGIAGVSMTLEPGAMRELHWHATAAEWAFVLTGHVRTTVIDPQGAAETNDFGPGDVWYFPRGHGHMLECLGDKPAHFILIFDNGYFSEFGTFSITDWIGHTPKALLAKNFGLPESAFDGFPKDEVYFARGAVPPATPAAPLQGRKLPPLTHKYELLEQPPHKVFKGGREWRVDSTRFPISKTVTGVVLDLEPGALRELHWHPNADEWQYVIDGNISVTMFGSHGRYRTEQMEKGDVGYIPQGYGHSIENVGDRPCRVLIGFNTGNYEAIDLSQWIAGNPADVLATNFSKPTSLFEKFPKQDVFIAPGKGQTGHHHHHH

SEQ ID NO: 81 - DNA, 1107 bp, synthetic construct
  misc_feature 1..1107: note = Variant of oxalate decarboxylase from Gemmata sp. SH-PL17
  source 1..1107: mol_type = other DNA
atgggtgatccgacctttatgaataatgtgccagaccatctgctggcggataaagatttgccgacgttcaagtttgccctggaaaagagcgagggcaaagtcattgggaaaagttcgggaaaagaagcaaccgttgttcagttacctatctccaaaggcattgctggtgtgagcatgactcttgaaccgggtgcgatgcgcgaattgcactggcatgccacagcagcagagtgggctttcgtattaaccggccacgtccgtacgacggtgatcgatccacaaggtgcggccgaaaccaacgactttggaccgggcgacgtgtggtattttcctcgcggtcatgggcacatgctggaatgcctgggcgataaaccggcgcatttcattctgatcttcgataacggctacttctcagagtttggcaccttctctattactgactggatcggtcacacaccgaaagcgcttctcgccaagaactttggtctgcccgaatcggcttttgatgggtttcccaaagacgaggtctattttgcacgtggcgcggttccaccagccacccctgcagcgcctttacagggacgccgtttgccaccactcacgcataaatacgaactcctcgaacagccgcctcataaagtattcaaaggtggtcgtgaatggcgcgtggatagcacccgttttcccatttccaagactgtaaccggcgttgttcttgatttggaacccggcgcgttacgcgagcttcactggcatcctaatgctgacgagtggcaatatgtgatcgatggcaacattagtgtgacgatgttcggttctcatggccgttaccgcaccgaacagatggagaaaggtgatgtcgggtatattccacaggggtatggccacagcatcgaaaatgtgggagatcgtccttgtcgcgtcttgattggctttaacacaggtaactacgaagccatcgacttatcacaatggattgcaggtaatcccgcggatgttcttgccacgaacttctccaaacccaccagcctctttgaaaagttcccaaaacaggacgtgtttattgctcctggcaagggccaaactggccaccatcaccatcaccat

SEQ ID NO: 82 - protein, 369 aa, synthetic construct
  REGION 1..369: note = Variant of oxalate decarboxylase from Gemmata sp. SH-PL17
MGDPTFMNNVPDHLLADKDLPTFKFALEKSEGKVIGKSSGKEATVVQLPISKGIAGVSMTLEPGAMRELHWHATAAEWAFVLTGHVRTTVIDPQGAAETNDFGPGDVWYFPRGHGHMLECLGDKPAHFILIFDNGYFSEFGTFSITDWIGHTPKALLAKNFGLPESAFDGFPKDEVYFARGAVPPATPAAPLQGRRLPPLTHKYELLEQPPHKVFKGGREWRVDSTRFPISKTVTGVVLDLEPGALRELHWHPNADEWQYVIDGNISVTMFGSHGRYRTEQMEKGDVGYIPQGYGHSIENVGDRPCRVLIGFNTGNYEAIDLSQWIAGNPADVLATNFSKPTSLFEKFPKQDVFIAPGKGQTGHHHHHH

SEQ ID NO: 83 - DNA, 1107 bp, synthetic construct
  misc_feature 1..1107: note = Variant of oxalate decarboxylase from Gemmata sp. SH-PL17
  source 1..1107: mol_type = other DNA
atgggtgatccgaccgcgatgaataatgtgccagaccatctgctggcggataaagatttgccgacgttcaagtttgccctggaaaagagcgagggcaaagtcattgggaaaagttcgggaaaagaagcaaccgttgttcagttacctatctccaaaggcattgctggtgtgagcatgactcttgaaccgggtgcgatgcgcgaattgcactggcatgccacagcagcagagtgggctttcgtattaaccggccacgtccgtacgacggtgatcgatccacaaggtgcggccgaaaccaacgactttggaccgggcgacgtgtggtattttcctcgcggtcatgggcacatgctggaatgcctgggcgataaaccggcgcatttcattctgatcttcgataacggctacttctcagagtttggcaccttctctattactgactggatcggtcacacaccgaaagcgcttctcgccaagaactttggtctgcccgaatcggcttttgatgggtttcccaaagacgaggtctattttgcacgtggcgcggttccaccagccacccctgcagcgcctttacagggacgcaaattgccaccactcacgcataaatacgaactcctcgaacagccgcctcataaagtattcaaaggtggtcgtgaatggcgcgtggatagcacccgttttcccatttccaagactgtaaccggcgttgttcttgatttggaacccggcgcgttacgcgagcttcactggcatcctaatgctgacgagtggcaatatgtgatcgatggcaacattagtgtgacgatgttcggttctcatggccgttaccgcaccgaacagatggagaaaggtgatgtcgggtatattccacaggggtatggccacagcatcgaaaatgtgggagatcgtccttgtcgcgtcttgattggctttaacacaggtaactacgaagccatcgacttatcacaatggattgcaggtaatcccgcggatgttcttgccacgaacttctccaaacccaccagcctctttgaaaagttcccaaaacaggacgtgtttattgctcctggcaagggccaaactggccaccatcaccatcaccat

SEQ ID NO: 84 - protein, 369 aa, synthetic construct
  REGION 1..369: note = Variant of oxalate decarboxylase from Gemmata sp. SH-PL17
MGDPTAMNNVPDHLLADKDLPTFKFALEKSEGKVIGKSSGKEATVVQLPISKGIAGVSMTLEPGAMRELHWHATAAEWAFVLTGHVRTTVIDPQGAAETNDFGPGDVWYFPRGHGHMLECLGDKPAHFILIFDNGYFSEFGTFSITDWIGHTPKALLAKNFGLPESAFDGFPKDEVYFARGAVPPATPAAPLQGRKLPPLTHKYELLEQPPHKVFKGGREWRVDSTRFPISKTVTGVVLDLEPGALRELHWHPNADEWQYVIDGNISVTMFGSHGRYRTEQMEKGDVGYIPQGYGHSIENVGDRPCRVLIGFNTGNYEAIDLSQWIAGNPADVLATNFSKPTSLFEKFPKQDVFIAPGKGQTGHHHHHH

SEQ ID NO: 85 - DNA, 1107 bp, synthetic construct
  misc_feature 1..1107: note = Variant of oxalate decarboxylase from Gemmata sp. SH-PL17
  source 1..1107: mol_type = other DNA
atgggtgatccgacctttatgaataatgtgccagaccatctgctggcggataaagatttgccgacgttcaagtttgccctggaaaagagcgagggcaaagtcattgggaaaagttcgggaaaagaagcaaccgttgttcagttacctatctccaaaggcattgctggtgtgagcatgactcttgaaccgggtgcgatgcgcgaattgcactggcatgccacagcagcagagtgggctttcgtattaaccggccacgtccgtacgacggtgatcgatccacaaggtgcggccgaaaccaacgactttggaccgggcgacgtgtggtattttcctcgcggtcatgggcacatgctggaatgcctgggcgattgtccggcgcatttcattctgatcttcgataacggctacttctcagagtttggcaccttctctattactgactggatcggtcacacaccgaaagcgcttctcgccaagaactttggtctgcccgaatcggcttttgatgggtttcccaaagacgaggtctattttgcacgtggcgcggttccaccagccacccctgcagcgcctttacagggacgcaaattgccaccactcacgcataaatacgaactcctcgaacagccgcctcataaagtattcaaaggtggtcgtgaatggcgcgtggatagcacccgttttcccatttccaagactgtaaccggcgttgttcttgatttggaacccggcgcgttacgcgagcttcactggcatcctaatgctgacgagtggcaatatgtgatcgatggcaacattagtgtgacgatgttcggttctcatggccgttaccgcaccgaacagatggagaaaggtgatgtcgggtatattccacaggggtatggccacagcatcgaaaatgtgggagatcgtccttgtcgcgtcttgattggctttaacacaggtaactacgaagccatcgacttatcacaatggattgcaggtaatcccgcggatgttcttgccacgaacttctccaaacccaccagcctctttgaaaagttcccaaaacaggacgtgtttattgctcctggcaagggccaaactggccaccatcaccatcaccat

SEQ ID NO: 86 - protein, 369 aa, synthetic construct
  REGION 1..369: note = Variant of oxalate decarboxylase from Gemmata sp. SH-PL17
MGDPTFMNNVPDHLLADKDLPTFKFALEKSEGKVIGKSSGKEATVVQLPISKGIAGVSMTLEPGAMRELHWHATAAEWAFVLTGHVRTTVIDPQGAAETNDFGPGDVWYFPRGHGHMLECLGDCPAHFILIFDNGYFSEFGTFSITDWIGHTPKALLAKNFGLPESAFDGFPKDEVYFARGAVPPATPAAPLQGRKLPPLTHKYELLEQPPHKVFKGGREWRVDSTRFPISKTVTGVVLDLEPGALRELHWHPNADEWQYVIDGNISVTMFGSHGRYRTEQMEKGDVGYIPQGYGHSIENVGDRPCRVLIGFNTGNYEAIDLSQWIAGNPADVLATNFSKPTSLFEKFPKQDVFIAPGKGQTGHHHHHH

SEQ ID NO: 87 - DNA, 1107 bp, synthetic construct
  misc_feature 1..1107: note = Variant of oxalate decarboxylase from Gemmata sp. SH-PL17
  source 1..1107: mol_type = other DNA
atgggtgatccgacctttatgaataatgtgccagaccatctgctggcggataaagatttgccgacgttcaagtttgccctggaaaagagcgagggcaaagtcattgggaaaagttcgggaaaagaagcaaccgttgttcagttacctatctccaaaggcattgctggtgtgagcatgactcttgaaccgggtgcgatgcgcgaattgcactggcatgccacagcagcagagtgggctttcgtattaaccggccacgtccgtacgacggtgatcgatccacaaggtgcggccgaaaccaacgactttggaccgggcgacgtgtggtattttcctcgcggtcatgggcacatgctggaatgcctgggcgataaaccggcgcatttcattctgatcttcgataacggctacttctcagagtttggcaccttctctattactgactggatcggtcacacaccgaaagcgcttctcgccaagaactttggtctgcccgaatcggcttttgatgggtttcccaaagacgaggtctattttgcacgtggcgcggttccaccagccacccctgcagcgcctttacagggatataaattgccaccactcacgcataaatacgaactcctcgaacagccgcctcataaagtattcaaaggtggtcgtgaatggcgcgtggatagcacccgttttcccatttccaagactgtaaccggcgttgttcttgatttggaacccggcgcgttacgcgagcttcactggcatcctaatgctgacgagtggcaatatgtgatcgatggcaacattagtgtgacgatgttcggttctcatggccgttaccgcaccgaacagatggagaaaggtgatgtcgggtatattccacaggggtatggccacagcatcgaaaatgtgggagatcgtccttgtcgcgtcttgattggctttaacacaggtaactacgaagccatcgacttatcacaatggattgcaggtaatcccgcggatgttcttgccacgaacttctccaaacccaccagcctctttgaaaagttcccaaaacaggacgtgtttattgctcctggcaagggccaaactggccaccatcaccatcaccat

SEQ ID NO: 88 - protein, 369 aa, synthetic construct
  REGION 1..369: note = Variant of oxalate decarboxylase from Gemmata sp. SH-PL17
MGDPTFMNNVPDHLLADKDLPTFKFALEKSEGKVIGKSSGKEATVVQLPISKGIAGVSMTLEPGAMRELHWHATAAEWAFVLTGHVRTTVIDPQGAAETNDFGPGDVWYFPRGHGHMLECLGDKPAHFILIFDNGYFSEFGTFSITDWIGHTPKALLAKNFGLPESAFDGFPKDEVYFARGAVPPATPAAPLQGYKLPPLTHKYELLEQPPHKVFKGGREWRVDSTRFPISKTVTGVVLDLEPGALRELHWHPNADEWQYVIDGNISVTMFGSHGRYRTEQMEKGDVGYIPQGYGHSIENVGDRPCRVLIGFNTGNYEAIDLSQWIAGNPADVLATNFSKPTSLFEKFPKQDVFIAPGKGQTGHHHHHH

SEQ ID NO: 89 - DNA, 1107 bp, synthetic construct
  misc_feature 1..1107: note = Variant of oxalate decarboxylase from Gemmata sp. SH-PL17
  source 1..1107: mol_type = other DNA
atgggtgatccgacctttatgaataatgtgccagaccatctgctggcggataaagatttgccgacgttcaagtttgccctggaaaagagcgagggcaaagtcattgggaaaagttcgggaaaagaagcaaccgttgttcagttacctatctccaaaggcattgctggtgtgagcatgactcttgaaccgggtgcgatgcgcgaattgcactggcatgccacagcagcagagtgggctttcgtattaaccggccacgtccgtacgacggtgatcgatccacaaggtgcggccgaaaccaacgactttggaccgggcgacgtgtggtattttcctcgcggtcatgggcacatgctggaatgcctgggcgataaaccggcgcatttcattctgatcttcgataacggctacttctcagagtttggcaccttctctattactgactggatcggtcacacaccgaaagcgcttctcgccaagaactttggtctgcccgaatcggcttttgatgggtttcccaaagacgaggtctattttgcagagggcgcggttccaccagccacccctgcagcgcctttacagggacgcaaattgccaccactcacgcataaatacgaactcctcgaacagccgcctcataaagtattcaaaggtggtcgtgaatggcgcgtggatagcacccgttttcccatttccaagactgtaaccggcgttgttcttgatttggaacccggcgcgttacgcgagcttcactggcatcctaatgctgacgagtggcaatatgtgatcgatggcaacattagtgtgacgatgttcggttctcatggccgttaccgcaccgaacagatggagaaaggtgatgtcgggtatattccacaggggtatggccacagcatcgaaaatgtgggagatcgtccttgtcgcgtcttgattggctttaacacaggtaactacgaagccatcgacttatcacaatggattgcaggtaatcccgcggatgttcttgccacgaacttctccaaacccaccagcctctttgaaaagttcccaaaacaggacgtgtttattgctcctggcaagggccaaactggccaccatcaccatcaccat

SEQ ID NO: 90 - protein, 369 aa, synthetic construct
  REGION 1..369: note = Variant of oxalate decarboxylase from Gemmata sp. SH-PL17
MGDPTFMNNVPDHLLADKDLPTFKFALEKSEGKVIGKSSGKEATVVQLPISKGIAGVSMTLEPGAMRELHWHATAAEWAFVLTGHVRTTVIDPQGAAETNDFGPGDVWYFPRGHGHMLECLGDKPAHFILIFDNGYFSEFGTFSITDWIGHTPKALLAKNFGLPESAFDGFPKDEVYFAEGAVPPATPAAPLQGRKLPPLTHKYELLEQPPHKVFKGGREWRVDSTRFPISKTVTGVVLDLEPGALRELHWHPNADEWQYVIDGNISVTMFGSHGRYRTEQMEKGDVGYIPQGYGHSIENVGDRPCRVLIGFNTGNYEAIDLSQWIAGNPADVLATNFSKPTSLFEKFPKQDVFIAPGKGQTGHHHHHH

SEQ ID NO: 91 - DNA, 1107 bp, synthetic construct
  misc_feature 1..1107: note = Variant of oxalate decarboxylase from Gemmata sp. SH-PL17
  source 1..1107: mol_type = other DNA
atgggtgatccgacctttatgaataatgtgccagaccatctgctggcggataaagatttgccgacgttcaagtttgccctggaaaagagcgagggcaaagtcattgggaaaagttcgggaaaagaagcaaccgttgttcagttacctatctccaaaggcattgctggtgtgagcatgactcttgaaccgggtgcgatgcgcgaattgcactggcatgccacagcagcagagtgggctctggtattaaccggccacgtccgtacgacggtgatcgatccacaaggtgcggccgaaaccaacgactttggaccgggcgacgtgtggtattttcctcgcggtcatgggcacatgctggaatgcctgggcgataaaccggcgcatttcattctgatcttcgataacggctacttctcagagtttggcaccttctctattactgactggatcggtcacacaccgaaagcgcttctcgccaagaactttggtctgcccgaatcggcttttgatgggtttcccaaagacgaggtctattttgcacgtggcgcggttccaccagccacccctgcagcgcctttacagggacgcaaattgccaccactcacgcataaatacgaactcctcgaacagccgcctcataaagtattcaaaggtggtcgtgaatggcgcgtggatagcacccgttttcccatttccaagactgtaaccggcgttgttcttgatttggaacccggcgcgttacgcgagcttcactggcatcctaatgctgacgagtggcaatatgtgatcgatggcaacattagtgtgacgatgttcggttctcatggccgttaccgcaccgaacagatggagaaaggtgatgtcgggtatattccacaggggtatggccacagcatcgaaaatgtgggagatcgtccttgtcgcgtcttgattggctttaacacaggtaactacgaagccatcgacttatcacaatggattgcaggtaatcccgcggatgttcttgccacgaacttctccaaacccaccagcctctttgaaaagttcccaaaacaggacgtgtttattgctcctggcaagggccaaactggccaccatcaccatcaccat

SEQ ID NO: 92 - protein, 369 aa, synthetic construct
  REGION 1..369: note = Variant of oxalate decarboxylase from Gemmata sp. SH-PL17
MGDPTFMNNVPDHLLADKDLPTFKFALEKSEGKVIGKSSGKEATVVQLPISKGIAGVSMTLEPGAMRELHWHATAAEWALVLTGHVRTTVIDPQGAAETNDFGPGDVWYFPRGHGHMLECLGDKPAHFILIFDNGYFSEFGTFSITDWIGHTPKALLAKNFGLPESAFDGFPKDEVYFARGAVPPATPAAPLQGRKLPPLTHKYELLEQPPHKVFKGGREWRVDSTRFPISKTVTGVVLDLEPGALRELHWHPNADEWQYVIDGNISVTMFGSHGRYRTEQMEKGDVGYIPQGYGHSIENVGDRPCRVLIGFNTGNYEAIDLSQWIAGNPADVLATNFSKPTSLFEKFPKQDVFIAPGKGQTGHHHHHH

SEQ ID NO: 93 - DNA, 1107 bp, synthetic construct
  misc_feature 1..1107: note = Variant of oxalate decarboxylase from Gemmata sp. SH-PL17
  source 1..1107: mol_type = other DNA
atgggtgatccgacctttatgaataatgtgccagaccatctgctggcggataaagatttgccgacgttcaagtttgccctggaaaagagcgagggcaaagtcattgggaaaagttcgggaaaagaagcaaccgttgttcagttacctatctccaaaggcattgctggtgtgagcatgactcttgaaccgggtgcgatgcgcgaattgcactggcatgccacagcagcagagtgggctttcgtattaaccggccacgtccgtacgacggtgatcgatccacaaggtgcggccgaaaccaacgactttggaccgggcgacgtgtggtattttcctcgcggtcatgggcacatgctggaatgcctgggcgataaaccggcgcatttcattctgatcttcgataacggctacttctcagagtttggcaccttctctattactgactggatcggtcacacaccgaaagcgcttctcgccaagaactttggtctgcccgaatcggcttttgatgggtttcccaaagacgaggtctattttgcacgtggcgcggttccaccagccacccctgcagcgcctttacagggacgcaaattgccaccactcacgcataaatacgaactcctcgaacagccgcctcataaagtattcaaaggtggtcgtgaatggcgcgtggatagcacccgttttcccatttccaagactgtaaccggcgttgttcttgatttggaagtgggcgcgttacgcgagcttcactggcatcctaatgctgacgagtggcaatatgtgatcgatggcaacattagtgtgacgatgttcggttctcatggccgttaccgcaccgaacagatggagaaaggtgatgtcgggtatattccacaggggtatggccacagcatcgaaaatgtgggagatcgtccttgtcgcgtcttgattggctttaacacaggtaactacgaagccatcgacttatcacaatggattgcaggtaatcccgcggatgttcttgccacgaacttctccaaacccaccagcctctttgaaaagttcccaaaacaggacgtgtttattgctcctggcaagggccaaactggccaccatcaccatcaccat

SEQ ID NO: 94 - protein, 369 aa, synthetic construct
  REGION 1..369: note = Variant of oxalate decarboxylase from Gemmata sp. SH-PL17
MGDPTFMNNVPDHLLADKDLPTFKFALEKSEGKVIGKSSGKEATVVQLPISKGIAGVSMTLEPGAMRELHWHATAAEWAFVLTGHVRTTVIDPQGAAETNDFGPGDVWYFPRGHGHMLECLGDKPAHFILIFDNGYFSEFGTFSITDWIGHTPKALLAKNFGLPESAFDGFPKDEVYFARGAVPPATPAAPLQGRKLPPLTHKYELLEQPPHKVFKGGREWRVDSTRFPISKTVTGVVLDLEVGALRELHWHPNADEWQYVIDGNISVTMFGSHGRYRTEQMEKGDVGYIPQGYGHSIENVGDRPCRVLIGFNTGNYEAIDLSQWIAGNPADVLATNFSKPTSLFEKFPKQDVFIAPGKGQTGHHHHHH

SEQ ID NO: 95 - DNA, 1107 bp, synthetic construct
  misc_feature 1..1107: note = Variant of oxalate decarboxylase from Gemmata sp. SH-PL17
  source 1..1107: mol_type = other DNA
atgggtgatccgacctttatgaataatgtgccagaccatctgctggcggataaagatttgccgacgttcaagtttgccctggaaaagagcgagggcaaagtcattgggaaaagttcgggaaaagaagcaaccgttgttcagttacctatctccaaaggcattgctggtgtgagcatgactcttgaaccgggtgcgatgcgcgaattgcactggcatgccacagcagcagagtgggctttcgtattaaccggccacgtccgtacgacggtgatcgatccacaaggtgcggccgaaaccaacgactttggaccgggcgacgtgtggtattttcctcgcggtcatgggcacatgctggaatgcctgggcgataaaccggcgcatttcattctgatcttcgataacggctacttctcagagtttggcaccttctctattactgactggatcggtcacacaccgaaagcgcttctcgccaagaactttggtctgcccgaatcggcttttgatgggtttcccaaagacgaggtctattttgcacgtggccgggttccaccagccacccctgcagcgcctttacagggacgcaaattgccaccactcacgcataaatacgaactcctcgaacagccgcctcataaagtattcaaaggtggtcgtgaatggcgcgtggatagcacccgttttcccatttccaagactgtaaccggcgttgttcttgatttggaacccggcgcgttacgcgagcttcactggcatcctaatgctgacgagtggcaatatgtgatcgatggcaacattagtgtgacgatgttcggttctcatggccgttaccgcaccgaacagatggagaaaggtgatgtcgggtatattccacaggggtatggccacagcatcgaaaatgtgggagatcgtccttgtcgcgtcttgattggctttaacacaggtaactacgaagccatcgacttatcacaatggattgcaggtaatcccgcggatgttcttgccacgaacttctccaaacccaccagcctctttgaaaagttcccaaaacaggacgtgtttattgctcctggcaagggccaaactggccaccatcaccatcaccat

SEQ ID NO: 96 - protein, 369 aa, synthetic construct
  REGION 1..369: note = Variant of oxalate decarboxylase from Gemmata sp. SH-PL17
MGDPTFMNNVPDHLLADKDLPTFKFALEKSEGKVIGKSSGKEATVVQLPISKGIAGVSMTLEPGAMRELHWHATAAEWAFVLTGHVRTTVIDPQGAAETNDFGPGDVWYFPRGHGHMLECLGDKPAHFILIFDNGYFSEFGTFSITDWIGHTPKALLAKNFGLPESAFDGFPKDEVYFARGRVPPATPAAPLQGRKLPPLTHKYELLEQPPHKVFKGGREWRVDSTRFPISKTVTGVVLDLEPGALRELHWHPNADEWQYVIDGNISVTMFGSHGRYRTEQMEKGDVGYIPQGYGHSIENVGDRPCRVLIGFNTGNYEAIDLSQWIAGNPADVLATNFSKPTSLFEKFPKQDVFIAPGKGQTGHHHHHH

SEQ ID NO: 97 - DNA, 1107 bp, synthetic construct
  misc_feature 1..1107: note = Variant of oxalate decarboxylase from Gemmata sp. SH-PL17
  source 1..1107: mol_type = other DNA
atgggtgatccgacctttatgaataatgtgccagaccatctgctggcggataaagatttgccgacgttcaagtttgccctggaaaagagcgagggcaaagtcattgggaaaagttcgggaaaagaagcaaccgttgttcagttacctatctccaaaggcattgctggtgtgagcatgactcttgaaccgggtgcgatgcgcgaattgcactggcatgccacagcagcagagtgggctttcgtattaaccggccacgtccgtacgacggtgatcgatccacaaggtgcggccgaaaccaacgactttggaccgggcgacgtgtggtattttcctcgcggtcatgggcacatgctggaatgcctgggcgataaaccggcgcatttcattctgatcttcgataacggctacttctcagagtttggcaccttctctattactgactggatcggtcacacaccgaaagcgcttctcgccaagaactttggtctgcccgaatcggcttttgatgggtttcccaaagacgaggtctattttgcacgtggcgcggttccaccagccacccctgcagcgcctttacagggacgcaaattgccaccactcacgcataaatacgaactcctcgaacaggagcctcataaagtattcaaaggtggtcgtgaatggcgcgtggatagcacccgttttcccatttccaagactgtaaccggcgttgttcttgatttggaacccggcgcgttacgcgagcttcactggcatcctaatgctgacgagtggcaatatgtgatcgatggcaacattagtgtgacgatgttcggttctcatggccgttaccgcaccgaacagatggagaaaggtgatgtcgggtatattccacaggggtatggccacagcatcgaaaatgtgggagatcgtccttgtcgcgtcttgattggctttaacacaggtaactacgaagccatcgacttatcacaatggattgcaggtaatcccgcggatgttcttgccacgaacttctccaaacccaccagcctctttgaaaagttcccaaaacaggacgtgtttattgctcctggcaagggccaaactggccaccatcaccatcaccat

SEQ ID NO: 98 - protein, 369 aa, synthetic construct
  REGION 1..369: note = Variant of oxalate decarboxylase from Gemmata sp. SH-PL17
MGDPTFMNNVPDHLLADKDLPTFKFALEKSEGKVIGKSSGKEATVVQLPISKGIAGVSMTLEPGAMRELHWHATAAEWAFVLTGHVRTTVIDPQGAAETNDFGPGDVWYFPRGHGHMLECLGDKPAHFILIFDNGYFSEFGTFSITDWIGHTPKALLAKNFGLPESAFDGFPKDEVYFARGAVPPATPAAPLQGRKLPPLTHKYELLEQEPHKVFKGGREWRVDSTRFPISKTVTGVVLDLEPGALRELHWHPNADEWQYVIDGNISVTMFGSHGRYRTEQMEKGDVGYIPQGYGHSIENVGDRPCRVLIGFNTGNYEAIDLSQWIAGNPADVLATNFSKPTSLFEKFPKQDVFIAPGKGQTGHHHHHH

SEQ ID NO: 99 - DNA, 1107 bp, synthetic construct
  misc_feature 1..1107: note = Variant of oxalate decarboxylase from Gemmata sp. SH-PL17
  source 1..1107: mol_type = other DNA
atgggtgatccgacctttgggaataatgtgccagaccatctgctggcggataaagatttgccgacgttcaagtttgccctggaaaagagcgagggcaaagtcattgggaaaagttcgggaaaagaagcaaccgttgttcagttacctatctccaaaggcattgctggtgtgagcatgactcttgaaccgggtgcgatgcgcgaattgcactggcatgccacagcagcagagtgggctttcgtattaaccggccacgtccgtacgacggtgatcgatccacaaggtgcggccgaaaccaacgactttggaccgggcgacgtgtggtattttcctcgcggtcatgggcacatgctggaatgcctgggcgataaaccggcgcatttcattctgatcttcgataacggctacttctcagagtttggcaccttctctattactgactggatcggtcacacaccgaaagcgcttctcgccaagaactttggtctgcccgaatcggcttttgatgggtttcccaaagacgaggtctattttgcacgtggcgcggttccaccagccacccctgcagcgcctttacagggacgcaaattgccaccactcacgcataaatacgaactcctcgaacagccgcctcataaagtattcaaaggtggtcgtgaatggcgcgtggatagcacccgttttcccatttccaagactgtaaccggcgttgttcttgatttggaacccggcgcgttacgcgagcttcactggcatcctaatgctgacgagtggcaatatgtgatcgatggcaacattagtgtgacgatgttcggttctcatggccgttaccgcaccgaacagatggagaaaggtgatgtcgggtatattccacaggggtatggccacagcatcgaaaatgtgggagatcgtccttgtcgcgtcttgattggctttaacacaggtaactacgaagccatcgacttatcacaatggattgcaggtaatcccgcggatgttcttgccacgaacttctccaaacccaccagcctctttgaaaagttcccaaaacaggacgtgtttattgctcctggcaagggccaaactggccaccatcaccatcaccat

SEQ ID NO: 100 - protein, 369 aa, synthetic construct
  REGION 1..369: note = Variant of oxalate decarboxylase from Gemmata sp. SH-PL17
MGDPTFGNNVPDHLLADKDLPTFKFALEKSEGKVIGKSSGKEATVVQLPISKGIAGVSMTLEPGAMRELHWHATAAEWAFVLTGHVRTTVIDPQGAAETNDFGPGDVWYFPRGHGHMLECLGDKPAHFILIFDNGYFSEFGTFSITDWIGHTPKALLAKNFGLPESAFDGFPKDEVYFARGAVPPATPAAPLQGRKLPPLTHKYELLEQPPHKVFKGGREWRVDSTRFPISKTVTGVVLDLEPGALRELHWHPNADEWQYVIDGNISVTMFGSHGRYRTEQMEKGDVGYIPQGYGHSIENVGDRPCRVLIGFNTGNYEAIDLSQWIAGNPADVLATNFSKPTSLFEKFPKQDVFIAPGKGQTGHHHHHH

SEQ ID NO: 101 - DNA, 1107 bp, synthetic construct
  misc_feature 1..1107: note = Variant of oxalate decarboxylase from Gemmata sp. SH-PL17
  source 1..1107: mol_type = other DNA
atgggtgatccgacctttatgaataatgtgccagaccatctgctggcggataaagatttgccgacgttcaagtttgccctggaaaagagcgagggcaaagtcattgggaaaagttcgggaaaagaagcaaccgttgttcagttacctatctccaaaggcattgctggtgtgagcatgactcttgaaccgggtgcgatgcgcgaattgcactggcatgccacagcagcagagtgggctttcgtattaaccggccacgtccgtacgacggtgatcgatccacaaggtgcggccgaaaccaacgactttggaccgggcgacgtgtggtattttcctcgcggtcatgggcacatgctggaatgcctgggcgataaaccggcgcatttcattctgatcttcgataacggctacttctcagagtttggcaccttctctattactgactggatcggtcacacaccgaaagcgcttctcgccaagaactttggtctgcccgaatcggcttttgatgggtttcccaaagacgaggtctattttgcacgtggcgcggttccaccagccacccctgcagcgcctttacagggacgcaaattgccaccactcacgcataaatacgaactcctcgaacagccgcctcataaagtattcaaaggtggtcgtgaatggcgcgtggatagctctcgttttcccatttccaagactgtaaccggcgttgttcttgatttggaacccggcgcgttacgcgagcttcactggcatcctaatgctgacgagtggcaatatgtgatcgatggcaacattagtgtgacgatgttcggttctcatggccgttaccgcaccgaacagatggagaaaggtgatgtcgggtatattccacaggggtatggccacagcatcgaaaatgtgggagatcgtccttgtcgcgtcttgattggctttaacacaggtaactacgaagccatcgacttatcacaatggattgcaggtaatcccgcggatgttcttgccacgaacttctccaaacccaccagcctctttgaaaagttcccaaaacaggacgtgtttattgctcctggcaagggccaaactggccaccatcaccatcaccat

SEQ ID NO: 102 - protein, 369 aa, synthetic construct
  REGION 1..369: note = Variant of oxalate decarboxylase from Gemmata sp. SH-PL17
MGDPTFMNNVPDHLLADKDLPTFKFALEKSEGKVIGKSSGKEATVVQLPISKGIAGVSMTLEPGAMRELHWHATAAEWAFVLTGHVRTTVIDPQGAAETNDFGPGDVWYFPRGHGHMLECLGDKPAHFILIFDNGYFSEFGTFSITDWIGHTPKALLAKNFGLPESAFDGFPKDEVYFARGAVPPATPAAPLQGRKLPPLTHKYELLEQPPHKVFKGGREWRVDSSRFPISKTVTGVVLDLEPGALRELHWHPNADEWQYVIDGNISVTMFGSHGRYRTEQMEKGDVGYIPQGYGHSIENVGDRPCRVLIGFNTGNYEAIDLSQWIAGNPADVLATNFSKPTSLFEKFPKQDVFIAPGKGQTGHHHHHH

SEQ ID NO: 103 - DNA, 1107 bp, synthetic construct
  misc_feature 1..1107: note = Variant of oxalate decarboxylase from Gemmata sp. SH-PL17
  source 1..1107: mol_type = other DNA
atgggtgatccgacctttatgaataatgtgccagaccatctgctggcggataaagatttgccgacgttcaagtttgccctggaaaagagcgagggcaaagtcattgggaaaagttcgggaaaagaagcaaccgttgttcagttacctatctccaaaggcattgctggtgtgagcatgactcttgaaccgggtgcgatgcgcgaattgcactggcatgccacagcagcagagtgggctttcgtattaaccggccacgtccgtacgacggtgatcgatccacaaggtgcggccgaaaccaacgactttggaccgggcgacgtgtggtattttcctcgcggtcatgggcacatgctggaatgcctgggcgataaaccggcgcatttcattctgatcttcgataacggctacttctcagagtttggcaccttctctattactgactggatcggtcacacaccgaaagcgcttctcgccaagaactttggtctgcccgaatcggcttttgatgggtttcccaaagctgaggtctattttgcacgtggcgcggttccaccagccacccctgcagcgcctttacagggacgcaaattgccaccactcacgcataaatacgaactcctcgaacagccgcctcataaagtattcaaaggtggtcgtgaatggcgcgtggatagcacccgttttcccatttccaagactgtaaccggcgttgttcttgatttggaacccggcgcgttacgcgagcttcactggcatcctaatgctgacgagtggcaatatgtgatcgatggcaacattagtgtgacgatgttcggttctcatggccgttaccgcaccgaacagatggagaaaggtgatgtcgggtatattccacaggggtatggccacagcatcgaaaatgtgggagatcgtccttgtcgcgtcttgattggctttaacacaggtaactacgaagccatcgacttatcacaatggattgcaggtaatcccgcggatgttcttgccacgaacttctccaaacccaccagcctctttgaaaagttcccaaaacaggacgtgtttattgctcctggcaagggccaaactggccaccatcaccatcaccat

SEQ ID NO: 104 - protein, 369 aa, synthetic construct
  REGION 1..369: note = Variant of oxalate decarboxylase from Gemmata sp. SH-PL17
MGDPTFMNNVPDHLLADKDLPTFKFALEKSEGKVIGKSSGKEATVVQLPISKGIAGVSMTLEPGAMRELHWHATAAEWAFVLTGHVRTTVIDPQGAAETNDFGPGDVWYFPRGHGHMLECLGDKPAHFILIFDNGYFSEFGTFSITDWIGHTPKALLAKNFGLPESAFDGFPKAEVYFARGAVPPATPAAPLQGRKLPPLTHKYELLEQPPHKVFKGGREWRVDSTRFPISKTVTGVVLDLEPGALRELHWHPNADEWQYVIDGNISVTMFGSHGRYRTEQMEKGDVGYIPQGYGHSIENVGDRPCRVLIGFNTGNYEAIDLSQWIAGNPADVLATNFSKPTSLFEKFPKQDVFIAPGKGQTGHHHHHH

SEQ ID NO: 105 - DNA, 1107 bp, synthetic construct
  misc_feature 1..1107: note = Variant of oxalate decarboxylase from Gemmata sp. SH-PL17
  source 1..1107: mol_type = other DNA
atgggtgatccgacctttatgaataatgtgccagaccatctgctggcggataaagatttgccgacgttcaagtttgccctggaaaagagcgagggcaaagtcattgggaaaagttcgggaaaagaagcaaccgttgttcagttacctatctccaaaggcattgctggtgtgagcatgactcttgaaccgggtgcgatgcgcgaattgcactggcatgccacagcagcagagtgggctttcgtattaaccggccacgtccgtacgacggtgatcgatccacaaggtgcggccgaaaccaacgactttggaccgggcgacgtgtggtattttcctcgcggtcatgggcacatgctggaatgcctgggcgataaaccggcgcatttcattctgatcttcgataacggctacttctcagagtttggcaccttctctattactgactggatcggtcacacaccgaaagcgcttctcgccaagaactttggtctgcccgaatcggcttttgatgggtttcccaaagacgaggtctattttgcacgtggcgcggttccaccagccacccctgcagcgcctttacagggacgcatgttgccaccactcacgcataaatacgaactcctcgaacagccgcctcataaagtattcaaaggtggtcgtgaatggcgcgtggatagcacccgttttcccatttccaagactgtaaccggcgttgttcttgatttggaacccggcgcgttacgcgagcttcactggcatcctaatgctgacgagtggcaatatgtgatcgatggcaacattagtgtgacgatgttcggttctcatggccgttaccgcaccgaacagatggagaaaggtgatgtcgggtatattccacaggggtatggccacagcatcgaaaatgtgggagatcgtccttgtcgcgtcttgattggctttaacacaggtaactacgaagccatcgacttatcacaatggattgcaggtaatcccgcggatgttcttgccacgaacttctccaaacccaccagcctctttgaaaagttcccaaaacaggacgtgtttattgctcctggcaagggccaaactggccaccatcaccatcaccat

SEQ ID NO: 106 - protein, 369 aa, synthetic construct
  REGION 1..369: note = Variant of oxalate decarboxylase from Gemmata sp. SH-PL17
MGDPTFMNNVPDHLLADKDLPTFKFALEKSEGKVIGKSSGKEATVVQLPISKGIAGVSMTLEPGAMRELHWHATAAEWAFVLTGHVRTTVIDPQGAAETNDFGPGDVWYFPRGHGHMLECLGDKPAHFILIFDNGYFSEFGTFSITDWIGHTPKALLAKNFGLPESAFDGFPKDEVYFARGAVPPATPAAPLQGRMLPPLTHKYELLEQPPHKVFKGGREWRVDSTRFPISKTVTGVVLDLEPGALRELHWHPNADEWQYVIDGNISVTMFGSHGRYRTEQMEKGDVGYIPQGYGHSIENVGDRPCRVLIGFNTGNYEAIDLSQWIAGNPADVLATNFSKPTSLFEKFPKQDVFIAPGKGQTGHHHHHH

SEQ ID NO: 107 - DNA, 1107 bp, synthetic construct
  misc_feature 1..1107: note = Variant of oxalate decarboxylase from Gemmata sp. SH-PL17
  source 1..1107: mol_type = other DNA
atgggtgattgtacctttatgaataatgtgccagaccatctgctggcggataaagatttgccgacgttcaagtttgccctggaaaagagcgagggcaaagtcattgggaaaagttcgggaaaagaagcaaccgttgttcagttacctatctccaaaggcattgctggtgtgagcatgactcttgaaccgggtgcgatgcgcgaattgcactggcatgccacagcagcagagtgggctttcgtattaaccggccacgtccgtacgacggtgatcgatccacaaggtgcggccgaaaccaacgactttggaccgggcgacgtgtggtattttcctcgcggtcatgggcacatgctggaatgcctgggcgataaaccggcgcatttcattctgatcttcgataacggctacttctcagagtttggcaccttctctattactgactggatcggtcacacaccgaaagcgcttctcgccaagaactttggtctgcccgaatcggcttttgatgggtttcccaaagacgaggtctattttgcacgtggcgcggttccaccagccacccctgcagcgcctttacagggacgcaaattgccaccactcacgcataaatacgaactcctcgaacagccgcctcataaagtattcaaaggtggtcgtgaatggcgcgtggatagcacccgttttcccatttccaagactgtaaccggcgttgttcttgatttggaacccggcgcgttacgcgagcttcactggcatcctaatgctgacgagtggcaatatgtgatcgatggcaacattagtgtgacgatgttcggttctcatggccgttaccgcaccgaacagatggagaaaggtgatgtcgggtatattccacaggggtatggccacagcatcgaaaatgtgggagatcgtccttgtcgcgtcttgattggctttaacacaggtaactacgaagccatcgacttatcacaatggattgcaggtaatcccgcggatgttcttgccacgaacttctccaaacccaccagcctctttgaaaagttcccaaaacaggacgtgtttattgctcctggcaagggccaaactggccaccatcaccatcaccat

SEQ ID NO: 108 - protein, 369 aa, synthetic construct
  REGION 1..369: note = Variant of oxalate decarboxylase from Gemmata sp. SH-PL17
MGDCTFMNNVPDHLLADKDLPTFKFALEKSEGKVIGKSSGKEATVVQLPISKGIAGVSMTLEPGAMRELHWHATAAEWAFVLTGHVRTTVIDPQGAAETNDFGPGDVWYFPRGHGHMLECLGDKPAHFILIFDNGYFSEFGTFSITDWIGHTPKALLAKNFGLPESAFDGFPKDEVYFARGAVPPATPAAPLQGRKLPPLTHKYELLEQPPHKVFKGGREWRVDSTRFPISKTVTGVVLDLEPGALRELHWHPNADEWQYVIDGNISVTMFGSHGRYRTEQMEKGDVGYIPQGYGHSIENVGDRPCRVLIGFNTGNYEAIDLSQWIAGNPADVLATNFSKPTSLFEKFPKQDVFIAPGKGQTGHHHHHH

SEQ ID NO: 109 - DNA, 1107 bp, synthetic construct
  misc_feature 1..1107: note = Variant of oxalate decarboxylase from Gemmata sp. SH-PL17
  source 1..1107: mol_type = other DNA
atgggtgatccgacctttatgaataatgtgccagaccatctgctggcggataaagatttgccgacgttcaagtttgccctggaaaagagcgagggcaaagtcattgggaaaagttcgggaaaagaagcaaccgttgttcagttacctatctccaaaggcattgctggtgtgagcatgactcttgaaccgggtgcgatgcgcgaattgcactggcatgccacagcagcagagtgggctttcgtattaaccggccacgtccgtacgacggtgatcgatccacaaggtgcggccgaaaccaacgactttggaccgggcgacgtgtggtattttcctcgcggtcatgggcacatgctggaatgcctgggcgataaaccggcgcatttcattctgatcttcgataacggctacttctcagagtttggcaccttctctattactgactggatcggtcacacaccgaaagcggagctcgccaagaactttggtctgcccgaatcggcttttgatgggtttcccaaagacgaggtctattttgcacgtggcgcggttccaccagccacccctgcagcgcctttacagggacgcaaattgccaccactcacgcataaatacgaactcctcgaacagccgcctcataaagtattcaaaggtggtcgtgaatggcgcgtggatagcacccgttttcccatttccaagactgtaaccggcgttgttcttgatttggaacccggcgcgttacgcgagcttcactggcatcctaatgctgacgagtggcaatatgtgatcgatggcaacattagtgtgacgatgttcggttctcatggccgttaccgcaccgaacagatggagaaaggtgatgtcgggtatattccacaggggtatggccacagcatcgaaaatgtgggagatcgtccttgtcgcgtcttgattggctttaacacaggtaactacgaagccatcgacttatcacaatggattgcaggtaatcccgcggatgttcttgccacgaacttctccaaacccaccagcctctttgaaaagttcccaaaacaggacgtgtttattgctcctggcaagggccaaactggccaccatcaccatcaccat

SEQ ID NO: 110 - protein, 369 aa, synthetic construct
  REGION 1..369: note = Variant of oxalate decarboxylase from Gemmata sp. SH-PL17
MGDPTFMNNVPDHLLADKDLPTFKFALEKSEGKVIGKSSGKEATVVQLPISKGIAGVSMTLEPGAMRELHWHATAAEWAFVLTGHVRTTVIDPQGAAETNDFGPGDVWYFPRGHGHMLECLGDKPAHFILIFDNGYFSEFGTFSITDWIGHTPKAELAKNFGLPESAFDGFPKDEVYFARGAVPPATPAAPLQGRKLPPLTHKYELLEQPPHKVFKGGREWRVDSTRFPISKTVTGVVLDLEPGALRELHWHPNADEWQYVIDGNISVTMFGSHGRYRTEQMEKGDVGYIPQGYGHSIENVGDRPCRVLIGFNTGNYEAIDLSQWIAGNPADVLATNFSKPTSLFEKFPKQDVFIAPGKGQTGHHHHHH

SEQ ID NO: 111 - DNA, 1107 bp, synthetic construct
  misc_feature 1..1107: note = Variant of oxalate decarboxylase from Gemmata sp. SH-PL17
  source 1..1107: mol_type = other DNA
atgggtgatccgacctttatgaataatgtgccagaccatctgctggcggataaagatttgccgacgttcaagtttgccctggaaaagagcgagggcaaagtcattgggaaaagttcgggaaaagaagcaaccgttgttcagttacctatctccaaaggcattgctggtgtgagcatgactcttgaaccgggtgcgatgcgcgaattgcactggcatgccacagcagcagagtgggctttcgtattaaccggccacgtccgtacgacggtgatcgatccacaaggtgcggccgaaaccaacgactttggaccgggcgacgtgtggtattttcctcgcggtcatgggcacatgctggaatgcctgggcgataaaccggcgcatttcattctgatcttcgataacggctacttctcagagtttggcaccttctctattactgactggatcggtcacacaccgaaagcgcttctcgccaagaactttggtctgcccgaatcggcttttgatgggtttcccaaagacgaggtctattttgcacgtggcgcggagccaccagccacccctgcagcgcctttacagggacgcaaattgccaccactcacgcataaatacgaactcctcgaacagccgcctcataaagtattcaaaggtggtcgtgaatggcgcgtggatagcacccgttttcccatttccaagactgtaaccggcgttgttcttgatttggaacccggcgcgttacgcgagcttcactggcatcctaatgctgacgagtggcaatatgtgatcgatggcaacattagtgtgacgatgttcggttctcatggccgttaccgcaccgaacagatggagaaaggtgatgtcgggtatattccacaggggtatggccacagcatcgaaaatgtgggagatcgtccttgtcgcgtcttgattggctttaacacaggtaactacgaagccatcgacttatcacaatggattgcaggtaatcccgcggatgttcttgccacgaacttctccaaacccaccagcctctttgaaaagttcccaaaacaggacgtgtttattgctcctggcaagggccaaactggccaccatcaccatcaccat

SEQ ID NO: 112 - protein, 369 aa, synthetic construct
  REGION 1..369: note = Variant of oxalate decarboxylase from Gemmata sp. SH-PL17
MGDPTFMNNVPDHLLADKDLPTFKFALEKSEGKVIGKSSGKEATVVQLPISKGIAGVSMTLEPGAMRELHWHATAAEWAFVLTGHVRTTVIDPQGAAETNDFGPGDVWYFPRGHGHMLECLGDKPAHFILIFDNGYFSEFGTFSITDWIGHTPKALLAKNFGLPESAFDGFPKDEVYFARGAEPPATPAAPLQGRKLPPLTHKYELLEQPPHKVFKGGREWRVDSTRFPISKTVTGVVLDLEPGALRELHWHPNADEWQYVIDGNISVTMFGSHGRYRTEQMEKGDVGYIPQGYGHSIENVGDRPCRVLIGFNTGNYEAIDLSQWIAGNPADVLATNFSKPTSLFEKFPKQDVFIAPGKGQTGHHHHHH

SEQ ID NO: 113 - DNA, 1107 bp, synthetic construct
  misc_feature 1..1107: note = Variant of oxalate decarboxylase from Gemmata sp. SH-PL17
  source 1..1107: mol_type = other DNA
atgggtgatccgacctttatgaataatgtgccagaccatctgctggcggataaagatttgccgacgttcaagtttgccctggaaaagagcgagggcaaagtcattgggaaaagttcgggaaaagaagcaaccgttgttcagttacctatctccaaaggcattgctggtgtgagcatgactcttgaaccgggtgcgatgcgcgaattgcactggcatgccacagcagcagagtgggctttcgtattaaccggccacgtccgtacgacggtgatcgatccacaaggtgcggccgaaaccaacgactttggaccgggcgacgtgtggtattttcctcgcggtcatgggcacatgctggaatgcctgggcgataaaccggcgcatttcattctgatcttcgataacggctacttctcagagtttggcaccttctctattactgactggatcggtcacacaccgaaagcgcttctcgccaagaactttggtctgcccgaatcggcttttgatgggtttcccaaagacgaggtctattttgcacgtggcgcggttccaccagccacccctgcagcgcctttacagggacgcaaattgccaccactcacgcataaatacgaactcctcgaacagccgcctcataaagtattcaaaggtggtcgtgaatggcgcgtggatagcaccagttttcccatttccaagactgtaaccggcgttgttcttgatttggaacccggcgcgttacgcgagcttcactggcatcctaatgctgacgagtggcaatatgtgatcgatggcaacattagtgtgacgatgttcggttctcatggccgttaccgcaccgaacagatggagaaaggtgatgtcgggtatattccacaggggtatggccacagcatcgaaaatgtgggagatcgtccttgtcgcgtcttgattggctttaacacaggtaactacgaagccatcgacttatcacaatggattgcaggtaatcccgcggatgttcttgccacgaacttctccaaacccaccagcctctttgaaaagttcccaaaacaggacgtgtttattgctcctggcaagggccaaactggccaccatcaccatcaccat

SEQ ID NO: 114 - protein, 369 aa, synthetic construct
  REGION 1..369: note = Variant of oxalate decarboxylase from Gemmata sp. SH-PL17
MGDPTFMNNVPDHLLADKDLPTFKFALEKSEGKVIGKSSGKEATVVQLPISKGIAGVSMTLEPGAMRELHWHATAAEWAFVLTGHVRTTVIDPQGAAETNDFGPGDVWYFPRGHGHMLECLGDKPAHFILIFDNGYFSEFGTFSITDWIGHTPKALLAKNFGLPESAFDGFPKDEVYFARGAVPPATPAAPLQGRKLPPLTHKYELLEQPPHKVFKGGREWRVDSTSFPISKTVTGVVLDLEPGALRELHWHPNADEWQYVIDGNISVTMFGSHGRYRTEQMEKGDVGYIPQGYGHSIENVGDRPCRVLIGFNTGNYEAIDLSQWIAGNPADVLATNFSKPTSLFEKFPKQDVFIAPGKGQTGHHHHHH

SEQ ID NO: 115 - DNA, 1107 bp, synthetic construct
  misc_feature 1..1107: note = Variant of oxalate decarboxylase from Gemmata sp. SH-PL17
  source 1..1107: mol_type = other DNA
atgggtgatccgacctttatgaataatgtgccagaccatctgctggcggataaagatttgccgacgttcaagtttgccctggaaaagagcgagggcaaagtcattgggaaaagttcgggaaaagaagcaaccgttgttcagttacctatctccaaaggcattgctggtgtgagcatgactcttgaaccgggtgcgatgcgcgaattgcactggcatgccacagcagcagagtgggctttcgtattaaccggccacgtccgtacgacggtgatcgatccacaaggtgcggccgaaaccaacgactttggaccgggcgacgtgtggtattttcctcgcggtcatgggcacatgctggaatgcctgggcgataaaccggcgcatttcattctgatcttcgataacggctacttctcagagtttggcaccttctctattactgactggatcggtcacacaccgaaagcgcttctcgccaagaactttggtctgcccgaatcggcttttgatgggtttcccaaagacgaggtctattttgcacgtggcgcggttccaccagccacccctgcagcgcctttacagggacgcaaattgccaccactcacgcataaatacgaactcctcgaacagccgcctcataaagtattcaaaggtggtgtggaatggcgcgtggatagcacccgttttcccatttccaagactgtaaccggcgttgttcttgatttggaacccggcgcgttacgcgagcttcactggcatcctaatgctgacgagtggcaatatgtgatcgatggcaacattagtgtgacgatgttcggttctcatggccgttaccgcaccgaacagatggagaaaggtgatgtcgggtatattccacaggggtatggccacagcatcgaaaatgtgggagatcgtccttgtcgcgtcttgattggctttaacacaggtaactacgaagccatcgacttatcacaatggattgcaggtaatcccgcggatgttcttgccacgaacttctccaaacccaccagcctctttgaaaagttcccaaaacaggacgtgtttattgctcctggcaagggccaaactggccaccatcaccatcaccat

SEQ ID NO: 116 - protein, 369 aa, synthetic construct
  REGION 1..369: note = Variant of oxalate decarboxylase from Gemmata sp. SH-PL17
MGDPTFMNNVPDHLLADKDLPTFKFALEKSEGKVIGKSSGKEATVVQLPISKGIAGVSMTLEPGAMRELHWHATAAEWAFVLTGHVRTTVIDPQGAAETNDFGPGDVWYFPRGHGHMLECLGDKPAHFILIFDNGYFSEFGTFSITDWIGHTPKALLAKNFGLPESAFDGFPKDEVYFARGAVPPATPAAPLQGRKLPPLTHKYELLEQPPHKVFKGGVEWRVDSTRFPISKTVTGVVLDLEPGALRELHWHPNADEWQYVIDGNISVTMFGSHGRYRTEQMEKGDVGYIPQGYGHSIENVGDRPCRVLIGFNTGNYEAIDLSQWIAGNPADVLATNFSKPTSLFEKFPKQDVFIAPGKGQTGHHHHHH

SEQ ID NO: 117 - DNA, 1107 bp, synthetic construct
  misc_feature 1..1107: note = Variant of oxalate decarboxylase from Gemmata sp. SH-PL17
  source 1..1107: mol_type = other DNA
atgggtgatccgacctttatgaataatgtgccagaccatctgctggcggataaagatttgccgacgttcaagtttgccctggaaaagagcgagggcaaagtcattgggaaaagttcgggaaaagaagcaaccgttgttcagttacctatctccaaaggcattgctggtgtgagcatgactcttggtccgggtgcgatgcgcgaattgcactggcatgccacagcagcagagtgggctttcgtattaaccggccacgtccgtacgacggtgatcgatccacaaggtgcggccgaaaccaacgactttggaccgggcgacgtgtggtattttcctcgcggtcatgggcacatgctggaatgcctgggcgataaaccggcgcatttcattctgatcttcgataacggctacttctcagagtttggcaccttctctattactgactggatcggtcacacaccgaaagcgcttctcgccaagaactttggtctgcccgaatcggcttttgatgggtttcccaaagacgaggtctattttgcacgtggcgcggttccaccagccacccctgcagcgcctttacagggacgcaaattgccaccactcacgcataaatacgaactcctcgaacagccgcctcataaagtattcaaaggtggtcgtgaatggcgcgtggatagcacccgttttcccatttccaagactgtaaccggcgttgttcttgatttggaacccggcgcgttacgcgagcttcactggcatcctaatgctgacgagtggcaatatgtgatcgatggcaacattagtgtgacgatgttcggttctcatggccgttaccgcaccgaacagatggagaaaggtgatgtcgggtatattccacaggggtatggccacagcatcgaaaatgtgggagatcgtccttgtcgcgtcttgattggctttaacacaggtaactacgaagccatcgacttatcacaatggattgcaggtaatcccgcggatgttcttgccacgaacttctccaaacccaccagcctctttgaaaagttcccaaaacaggacgtgtttattgctcctggcaagggccaaactggccaccatcaccatcaccat

SEQ ID NO: 118 - protein, 369 aa, synthetic construct
  REGION 1..369: note = Variant of oxalate decarboxylase from Gemmata sp. SH-PL17
MGDPTFMNNVPDHLLADKDLPTFKFALEKSEGKVIGKSSGKEATVVQLPISKGIAGVSMTLGPGAMRELHWHATAAEWAFVLTGHVRTTVIDPQGAAETNDFGPGDVWYFPRGHGHMLECLGDKPAHFILIFDNGYFSEFGTFSITDWIGHTPKALLAKNFGLPESAFDGFPKDEVYFARGAVPPATPAAPLQGRKLPPLTHKYELLEQPPHKVFKGGREWRVDSTRFPISKTVTGVVLDLEPGALRELHWHPNADEWQYVIDGNISVTMFGSHGRYRTEQMEKGDVGYIPQGYGHSIENVGDRPCRVLIGFNTGNYEAIDLSQWIAGNPADVLATNFSKPTSLFEKFPKQDVFIAPGKGQTGHHHHHH

SEQ ID NO: 119 - DNA, 1107 bp, synthetic construct
  misc_feature 1..1107: note = Variant of oxalate decarboxylase from Gemmata sp. SH-PL17
  source 1..1107: mol_type = other DNA
atgggtgatccgacctttatgaataatgtgccagaccatctgctggcggataaagatttgccgacgttcaagtttgccctggaaaagagcgagggcaaagtcattgggaaaagttcgggaaaagaagcaaccgttgttcagttacctatctccaaaggcattgctggtgtgagcatgactcttgaaccgggtgcgatgcgcgaattgcactggcatgccacagcagcagagtgggctttcgtattaaccggccacgtccgtacgacggtgatcgatccacaaggtgcggccgaaaccaacgactttggaccgggcgacgtgtggtattttcctcgcggtcatgggcacatgctggaatgcctgggcgataaaccggcgcatttcattctgatcttcgataacggctacttctcagagtttggcaccttctctattactgactggatcggtcacacaccgaaagcgcttctcgccaagaactttggtctgcccgaatcggcttttgatgggtttcccaaaggtgaggtctattttgcacgtggcgcggttccaccagccacccctgcagcgcctttacagggacgcaaattgccaccactcacgcataaatacgaactcctcgaacagccgcctcataaagtattcaaaggtggtcgtgaatggcgcgtggatagcacccgttttcccatttccaagactgtaaccggcgttgttcttgatttggaacccggcgcgttacgcgagcttcactggcatcctaatgctgacgagtggcaatatgtgatcgatggcaacattagtgtgacgatgttcggttctcatggccgttaccgcaccgaacagatggagaaaggtgatgtcgggtatattccacaggggtatggccacagcatcgaaaatgtgggagatcgtccttgtcgcgtcttgattggctttaacacaggtaactacgaagccatcgacttatcacaatggattgcaggtaatcccgcggatgttcttgccacgaacttctccaaacccaccagcctctttgaaaagttcccaaaacaggacgtgtttattgctcctggcaagggccaaactggccaccatcaccatcaccat

SEQ ID NO: 120 - protein, 369 aa, synthetic construct
  REGION 1..369: note = Variant of oxalate decarboxylase from Gemmata sp. SH-PL17
MGDPTFMNNVPDHLLADKDLPTFKFALEKSEGKVIGKSSGKEATVVQLPISKGIAGVSMTLEPGAMRELHWHATAAEWAFVLTGHVRTTVIDPQGAAETNDFGPGDVWYFPRGHGHMLECLGDKPAHFILIFDNGYFSEFGTFSITDWIGHTPKALLAKNFGLPESAFDGFPKGEVYFARGAVPPATPAAPLQGRKLPPLTHKYELLEQPPHKVFKGGREWRVDSTRFPISKTVTGVVLDLEPGALRELHWHPNADEWQYVIDGNISVTMFGSHGRYRTEQMEKGDVGYIPQGYGHSIENVGDRPCRVLIGFNTGNYEAIDLSQWIAGNPADVLATNFSKPTSLFEKFPKQDVFIAPGKGQTGHHHHHH

SEQ ID NO: 121 - DNA, 1107 bp, synthetic construct
  misc_feature 1..1107: note = Variant of oxalate decarboxylase from Gemmata sp. SH-PL17
  source 1..1107: mol_type = other DNA
atgggtgatccgacctttatgaataatgtgccagaccatctgctggcggataaagatttgccgacgttcaagtttgccctggaaaagagcgagggcaaagtcattgggaaaagttcgggaaaagaagcaaccgttgttcagttacctatctccaaaggcattgctggtgtgagcatgactcttgaaccgggtgcgatgcgcgaattgcactggcatgccacagcagcagagtgggctttcgtattaaccggccacgtccgtacgacggtgatcgatccacaaggtgcggccgaaaccaacgactttggaccgggcgacgtgtggtattttcctcgcggtcatgggcacatgctggaatgcctgggcgataaaccggcgcatttcattctgatcttcgataacggctacttctcagagtttggcaccttctctattactgactggatcggtcacacaccgaaagcgcttctcgccaagaactttggtctgcccgaatcggcttttggggggtttcccaaagacgaggtctattttgcacgtggcgcggttccaccagccacccctgcagcgcctttacagggacgcaaattgccaccactcacgcataaatacgaactcctcgaacagccgcctcataaagtattcaaaggtggtcgtgaatggcgcgtggatagcacccgttttcccatttccaagactgtaaccggcgttgttcttgatttggaacccggcgcgttacgcgagcttcactggcatcctaatgctgacgagtggcaatatgtgatcgatggcaacattagtgtgacgatgttcggttctcatggccgttaccgcaccgaacagatggagaaaggtgatgtcgggtatattccacaggggtatggccacagcatcgaaaatgtgggagatcgtccttgtcgcgtcttgattggctttaacacaggtaactacgaagccatcgacttatcacaatggattgcaggtaatcccgcggatgttcttgccacgaacttctccaaacccaccagcctctttgaaaagttcccaaaacaggacgtgtttattgctcctggcaagggccaaactggccaccatcaccatcaccat

SEQ ID NO: 122 - protein, 369 aa, synthetic construct
  REGION 1..369: note = Variant of oxalate decarboxylase from Gemmata sp. SH-PL17
MGDPTFMNNVPDHLLADKDLPTFKFALEKSEGKVIGKSSGKEATVVQLPISKGIAGVSMTLEPGAMRELHWHATAAEWAFVLTGHVRTTVIDPQGAAETNDFGPGDVWYFPRGHGHMLECLGDKPAHFILIFDNGYFSEFGTFSITDWIGHTPKALLAKNFGLPESAFGGFPKDEVYFARGAVPPATPAAPLQGRKLPPLTHKYELLEQPPHKVFKGGREWRVDSTRFPISKTVTGVVLDLEPGALRELHWHPNADEWQYVIDGNISVTMFGSHGRYRTEQMEKGDVGYIPQGYGHSIENVGDRPCRVLIGFNTGNYEAIDLSQWIAGNPADVLATNFSKPTSLFEKFPKQDVFIAPGKGQTGHHHHHH

SEQ ID NO: 123 - DNA, 1107 bp, synthetic construct
  misc_feature 1..1107: note = Variant of oxalate decarboxylase from Gemmata sp. SH-PL17
  source 1..1107: mol_type = other DNA
atgggtgatccgacctttatgaataatgtgccagaccatctgctggcggataaagatttgccgacgttcaagtttgccctggaaaagagcgagggcaaagtcattgggaaaagttcgggaaaagaagcaaccgttgttcagttacctatctccaaaggcattgctggtgtgagcatgactcttgaaccgggtgcgatgcgcgaattgcactggcatgccacagcagcagagtgggctttcgtattaaccggccacgtccgtacgacggtgatcgatccacaaggtgcggccgaaaccaacgactttggaccgggcgacgtgtggtattttcctcgcggtcatgggcacatgctggaatgcctgggcgatcgtccggcgcatttcattctgatcttcgataacggctacttctcagagtttggcaccttctctattactgactggatcggtcacacaccgaaagcgcttctcgccaagaactttggtctgcccgaatcggcttttgatgggtttcccaaagacgaggtctattttgcacgtggcgcggttccaccagccacccctgcagcgcctttacagggacgcaaattgccaccactcacgcataaatacgaactcctcgaacagccgcctcataaagtattcaaaggtggtcgtgaatggcgcgtggatagcacccgttttcccatttccaagactgtaaccggcgttgttcttgatttggaacccggcgcgttacgcgagcttcactggcatcctaatgctgacgagtggcaatatgtgatcgatggcaacattagtgtgacgatgttcggttctcatggccgttaccgcaccgaacagatggagaaaggtgatgtcgggtatattccacaggggtatggccacagcatcgaaaatgtgggagatcgtccttgtcgcgtcttgattggctttaacacaggtaactacgaagccatcgacttatcacaatggattgcaggtaatcccgcggatgttcttgccacgaacttctccaaacccaccagcctctttgaaaagttcccaaaacaggacgtgtttattgctcctggcaagggccaaactggccaccatcaccatcaccat

SEQ ID NO: 124 - protein, 369 aa, synthetic construct
  REGION 1..369: note = Variant of oxalate decarboxylase from Gemmata sp. SH-PL17
MGDPTFMNNVPDHLLADKDLPTFKFALEKSEGKVIGKSSGKEATVVQLPISKGIAGVSMTLEPGAMRELHWHATAAEWAFVLTGHVRTTVIDPQGAAETNDFGPGDVWYFPRGHGHMLECLGDRPAHFILIFDNGYFSEFGTFSITDWIGHTPKALLAKNFGLPESAFDGFPKDEVYFARGAVPPATPAAPLQGRKLPPLTHKYELLEQPPHKVFKGGREWRVDSTRFPISKTVTGVVLDLEPGALRELHWHPNADEWQYVIDGNISVTMFGSHGRYRTEQMEKGDVGYIPQGYGHSIENVGDRPCRVLIGFNTGNYEAIDLSQWIAGNPADVLATNFSKPTSLFEKFPKQDVFIAPGKGQTGHHHHHH

SEQ ID NO: 125 - DNA, 1107 bp, synthetic construct
  misc_feature 1..1107: note = Variant of oxalate decarboxylase from Gemmata sp. SH-PL17
  source 1..1107: mol_type = other DNA
atgggtgatccgacctttatgaataatgtgccagaccatctgctggcggataaagatttgccgacgttcaagtttgccctggaaaagagcgagggcaaagtcattgggaaaagttcgggaaaagaagcaaccgttgttcagttacctatctccaaaggcattgctggtgtgagcatgactcttgaaccgggtgcgatgcgcgaattgcactggcatgccacagcagcagagtgggctttcgtattaaccggccacgtccgtacgacggtgatcgatccacaaggtgcggccgaaaccaacgactttggaccgggcgacgtgtggtattttcctcgcggtcatgggcacatgctggaatgcctgggcgataaaccggcgcatttcattctgatcttcgataacggctacttctcagagtttggcaccttctctattactgactggatcggtcacacaccgaaagcgcttctcgccaagaactttggtctgcccgaatcggcttttgatgggtttcccaaagacgaggtctattttgcacgtggcgcggttccaccagccacccctgcagcgcctttacagggacgcaaattgccaccactcacgcataaatacgaactcctcgaacaggtgcctcataaagtattcaaaggtggtcgtgaatggcgcgtggatagcacccgttttcccatttccaagactgtaaccggcgttgttcttgatttggaacccggcgcgttacgcgagcttcactggcatcctaatgctgacgagtggcaatatgtgatcgatggcaacattagtgtgacgatgttcggttctcatggccgttaccgcaccgaacagatggagaaaggtgatgtcgggtatattccacaggggtatggccacagcatcgaaaatgtgggagatcgtccttgtcgcgtcttgattggctttaacacaggtaactacgaagccatcgacttatcacaatggattgcaggtaatcccgcggatgttcttgccacgaacttctccaaacccaccagcctctttgaaaagttcccaaaacaggacgtgtttattgctcctggcaagggccaaactggccaccatcaccatcaccat

SEQ ID NO: 126 - protein, 369 aa, synthetic construct
  REGION 1..369: note = Variant of oxalate decarboxylase from Gemmata sp. SH-PL17
MGDPTFMNNVPDHLLADKDLPTFKFALEKSEGKVIGKSSGKEATVVQLPISKGIAGVSMTLEPGAMRELHWHATAAEWAFVLTGHVRTTVIDPQGAAETNDFGPGDVWYFPRGHGHMLECLGDKPAHFILIFDNGYFSEFGTFSITDWIGHTPKALLAKNFGLPESAFDGFPKDEVYFARGAVPPATPAAPLQGRKLPPLTHKYELLEQVPHKVFKGGREWRVDSTRFPISKTVTGVVLDLEPGALRELHWHPNADEWQYVIDGNISVTMFGSHGRYRTEQMEKGDVGYIPQGYGHSIENVGDRPCRVLIGFNTGNYEAIDLSQWIAGNPADVLATNFSKPTSLFEKFPKQDVFIAPGKGQTGHHHHHH

SEQ ID NO: 127 - DNA, 1107 bp, synthetic construct
  misc_feature 1..1107: note = Variant of oxalate decarboxylase from Gemmata sp. SH-PL17
  source 1..1107: mol_type = other DNA
atgggtgatccgacctttatgaataatgtgccagaccatctgctggcggataaagatttgccgacgttcaagtttgccctggaaaagagcgagggcaaagtcattgggaaaagttcgggaaaagaagcaaccgttgttcagttacctatctccaaaggcattgctggtgtgagcatgactcttgaaccgggtgcgatgcgcgaattgcactggcatgccacagcagcagagtgggctttcgtattaaccggccacgtccgtacgacggtgatcgatccacaaggtgcggccgaaaccaacgactttggaccgggcgacgtgtggtattttcctcgcggtcatgggcacatgctggaatgcctgggcgataaaccggcgcatttcattctgatcttcgataacggctacttctcagagtttggcaccttctctattactgactggatcggtcacacaccgaaagcgcttctcgccaagaactttggtctgcccgaatcggcttttgatgggtttcccaaagacgaggtctattttgcacgtggcgcggttccaccagccacccctgcagcgcctttacagggacgcaaattgccaccactcacgcataaatacgaactcctcgaacagccgcctcataaagtattcaaaggtggtcgtgaatggcgcgtggatagcacccgttttcccatttccaagactgtaaccggcgttgttcttgatttggaacccggcgcgttacgcgagcttcactggcatcctaatgctgacgagtggcaatatgtgatcgatggcaacattagtgtgacgatgttcggttctcatggccgttaccgcaccgaacagatggagaaaggtgatgtcgggtatattccacaggggtatggccacagcatcgaaaatgtgggagatcgtccttgtcgcgtcttgattggctttaacacaggtaactacgaagccatcgacttatcacaatggattgcaggtaatcccgcggatgttcttgccacgaacttctccaaacccaccaggctctttgaaaagttcccaaaacaggacgtgtttattgctcctggcaagggccaaactggccaccatcaccatcaccat

SEQ ID NO: 128 - protein, 369 aa, synthetic construct
  REGION 1..369: note = Variant of oxalate decarboxylase from Gemmata sp. SH-PL17
MGDPTFMNNVPDHLLADKDLPTFKFALEKSEGKVIGKSSGKEATVVQLPISKGIAGVSMTLEPGAMRELHWHATAAEWAFVLTGHVRTTVIDPQGAAETNDFGPGDVWYFPRGHGHMLECLGDKPAHFILIFDNGYFSEFGTFSITDWIGHTPKALLAKNFGLPESAFDGFPKDEVYFARGAVPPATPAAPLQGRKLPPLTHKYELLEQPPHKVFKGGREWRVDSTRFPISKTVTGVVLDLEPGALRELHWHPNADEWQYVIDGNISVTMFGSHGRYRTEQMEKGDVGYIPQGYGHSIENVGDRPCRVLIGFNTGNYEAIDLSQWIAGNPADVLATNFSKPTRLFEKFPKQDVFIAPGKGQTGHHHHHH

SEQ ID NO: 129 - DNA, 1107 bp, synthetic construct
  misc_feature 1..1107: note = Variant of oxalate decarboxylase from Gemmata sp. SH-PL17
  source 1..1107: mol_type = other DNA
atgggtgatccgacctttatgaataatgtgccagaccatctgctggcggataaagatttgccgacgttcaagtttgccctggaaaagagcgagggcaaagtcattgggaaaagttcgggaaaagaagcaaccgttgttcagttacctatctccaaaggcattgctggtgtgagcatgactcttgaaccgggtgcgatgcgcgaattgcactggcatgccacagcagcagagtgggctttcgtattaaccggccacgtccgtacgacggtgatcgatccacaaggtgcggccgaaaccaacgactttggaccgggcgacgtgtggtattttcctcgcggtcatgggcacatgctggaatgcctgggcgataaaccggcgcatttcattctgatcttcgataacggctacttctcagagtttggcaccttctctattactgactggatcggtcacacaccgaaagcgcttctcgccaagaactttggtctgcccgaatcggcttttgatgggtttcccaaagacgaggtctattttgcacgtggcgcggttccaccagccacccctgcagcgcctttacagggacgcaaattgccaccactcacgcataaatacgaactcctcgaacagccgcctcataaagtattcagtggtggtcgtgaatggcgcgtggatagcacccgttttcccatttccaagactgtaaccggcgttgttcttgatttggaacccggcgcgttacgcgagcttcactggcatcctaatgctgacgagtggcaatatgtgatcgatggcaacattagtgtgacgatgttcggttctcatggccgttaccgcaccgaacagatggagaaaggtgatgtcgggtatattccacaggggtatggccacagcatcgaaaatgtgggagatcgtccttgtcgcgtcttgattggctttaacacaggtaactacgaagccatcgacttatcacaatggattgcaggtaatcccgcggatgttcttgccacgaacttctccaaacccaccagcctctttgaaaagttcccaaaacaggacgtgtttattgctcctggcaagggccaaactggccaccatcaccatcaccat

SEQ ID NO: 130 - protein, 369 aa, synthetic construct
  REGION 1..369: note = Variant of oxalate decarboxylase from Gemmata sp. SH-PL17
MGDPTFMNNVPDHLLADKDLPTFKFALEKSEGKVIGKSSGKEATVVQLPISKGIAGVSMTLEPGAMRELHWHATAAEWAFVLTGHVRTTVIDPQGAAETNDFGPGDVWYFPRGHGHMLECLGDKPAHFILIFDNGYFSEFGTFSITDWIGHTPKALLAKNFGLPESAFDGFPKDEVYFARGAVPPATPAAPLQGRKLPPLTHKYELLEQPPHKVFSGGREWRVDSTRFPISKTVTGVVLDLEPGALRELHWHPNADEWQYVIDGNISVTMFGSHGRYRTEQMEKGDVGYIPQGYGHSIENVGDRPCRVLIGFNTGNYEAIDLSQWIAGNPADVLATNFSKPTSLFEKFPKQDVFIAPGKGQTGHHHHHH

SEQ ID NO: 131 - DNA, 1107 bp, synthetic construct
  misc_feature 1..1107: note = Variant of oxalate decarboxylase from Gemmata sp. SH-PL17
  source 1..1107: mol_type = other DNA
atgggtgatccgacctttatgaataatgtgccagaccatctgctggcggataaagatttgccgacgttcaagtttgccctggaaaagagcgagggcaaagtcattgggaaaagttcgggaaaagaagcaaccgttgttcagttacctatctccaaaggcattgctggtgtgagcatgactcttgaaccgggtgcgatgcgcgaattgcactggcatgccacagcagcagagtgggctttcgtattaaccggccacgtccgtacgacggtgatcgatccacaaggtgcggccgaaaccaacgactttggaccgggcgacgtgtggtattttcctcgcggtcatgggcacatgctggaatgcctgggcgataaaccggcgcatttcattctgatcttcgataacggctacttctcagagtttggcaccttctctattactgactggatcggtcacacaccgaaagcgcttctcgccaagaactttggtctgcccgaatcggcttttgatgggtttcccaaagacgaggtctattttgcacgtggcgcggttccaccagccacccctgcagcgcctttacagggacgcaaattgccaccactcacgcataaatacgaactcctcgaacagcggcctcataaagtattcaaaggtggtcgtgaatggcgcgtggatagcacccgttttcccatttccaagactgtaaccggcgttgttcttgatttggaacccggcgcgttacgcgagcttcactggcatcctaatgctgacgagtggcaatatgtgatcgatggcaacattagtgtgacgatgttcggttctcatggccgttaccgcaccgaacagatggagaaaggtgatgtcgggtatattccacaggggtatggccacagcatcgaaaatgtgggagatcgtccttgtcgcgtcttgattggctttaacacaggtaactacgaagccatcgacttatcacaatggattgcaggtaatcccgcggatgttcttgccacgaacttctccaaacccaccagcctctttgaaaagttcccaaaacaggacgtgtttattgctcctggcaagggccaaactggccaccatcaccatcaccat

SEQ ID NO: 132 - protein, 369 aa, synthetic construct
  REGION 1..369: note = Variant of oxalate decarboxylase from Gemmata sp. SH-PL17
MGDPTFMNNVPDHLLADKDLPTFKFALEKSEGKVIGKSSGKEATVVQLPISKGIAGVSMTLEPGAMRELHWHATAAEWAFVLTGHVRTTVIDPQGAAETNDFGPGDVWYFPRGHGHMLECLGDKPAHFILIFDNGYFSEFGTFSITDWIGHTPKALLAKNFGLPESAFDGFPKDEVYFARGAVPPATPAAPLQGRKLPPLTHKYELLEQRPHKVFKGGREWRVDSTRFPISKTVTGVVLDLEPGALRELHWHPNADEWQYVIDGNISVTMFGSHGRYRTEQMEKGDVGYIPQGYGHSIENVGDRPCRVLIGFNTGNYEAIDLSQWIAGNPADVLATNFSKPTSLFEKFPKQDVFIAPGKGQTGHHHHHH

SEQ ID NO: 133 - DNA, 1107 bp, synthetic construct
  misc_feature 1..1107: note = Variant of oxalate decarboxylase from Gemmata sp. SH-PL17
  source 1..1107: mol_type = other DNA
atgggtgatccgacctggatgaataatgtgccagaccatctgctggcggataaagatttgccgacgttcaagtttgccctggaaaagagcgagggcaaagtcattgggaaaagttcgggaaaagaagcaaccgttgttcagttacctatctccaaaggcattgctggtgtgagcatgactcttgaaccgggtgcgatgcgcgaattgcactggcatgccacagcagcagagtgggctttcgtattaaccggccacgtccgtacgacggtgatcgatccacaaggtgcggccgaaaccaacgactttggaccgggcgacgtgtggtattttcctcgcggtcatgggcacatgctggaatgcctgggcgataaaccggcgcatttcattctgatcttcgataacggctacttctcagagtttggcaccttctctattactgactggatcggtcacacaccgaaagcgcttctcgccaagaactttggtctgcccgaatcggcttttgatgggtttcccaaagacgaggtctattttgcacgtggcgcggttccaccagccacccctgcagcgcctttacagggacgcaaattgccaccactcacgcataaatacgaactcctcgaacagccgcctcataaagtattcaaaggtggtcgtgaatggcgcgtggatagcacccgttttcccatttccaagactgtaaccggcgttgttcttgatttggaacccggcgcgttacgcgagcttcactggcatcctaatgctgacgagtggcaatatgtgatcgatggcaacattagtgtgacgatgttcggttctcatggccgttaccgcaccgaacagatggagaaaggtgatgtcgggtatattccacaggggtatggccacagcatcgaaaatgtgggagatcgtccttgtcgcgtcttgattggctttaacacaggtaactacgaagccatcgacttatcacaatggattgcaggtaatcccgcggatgttcttgccacgaacttctccaaacccaccagcctctttgaaaagttcccaaaacaggacgtgtttattgctcctggcaagggccaaactggccaccatcaccatcaccat

SEQ ID NO: 134 - protein, 369 aa, synthetic construct
  REGION 1..369: note = Variant of oxalate decarboxylase from Gemmata sp. SH-PL17
MGDPTWMNNVPDHLLADKDLPTFKFALEKSEGKVIGKSSGKEATVVQLPISKGIAGVSMTLEPGAMRELHWHATAAEWAFVLTGHVRTTVIDPQGAAETNDFGPGDVWYFPRGHGHMLECLGDKPAHFILIFDNGYFSEFGTFSITDWIGHTPKALLAKNFGLPESAFDGFPKDEVYFARGAVPPATPAAPLQGRKLPPLTHKYELLEQPPHKVFKGGREWRVDSTRFPISKTVTGVVLDLEPGALRELHWHPNADEWQYVIDGNISVTMFGSHGRYRTEQMEKGDVGYIPQGYGHSIENVGDRPCRVLIGFNTGNYEAIDLSQWIAGNPADVLATNFSKPTSLFEKFPKQDVFIAPGKGQTGHHHHHH

SEQ ID NO: 135 - DNA, 1107 bp, synthetic construct
  misc_feature 1..1107: note = Variant of oxalate decarboxylase from Gemmata sp. SH-PL17
  source 1..1107: mol_type = other DNA
atgggtgatcggacctttatgaataatgtgccagaccatctgctggcggataaagatttgccgacgttcaagtttgccctggaaaagagcgagggcaaagtcattgggaaaagttcgggaaaagaagcaaccgttgttcagttacctatctccaaaggcattgctggtgtgagcatgactcttgaaccgggtgcgatgcgcgaattgcactggcatgccacagcagcagagtgggctttcgtattaaccggccacgtccgtacgacggtgatcgatccacaaggtgcggccgaaaccaacgactttggaccgggcgacgtgtggtattttcctcgcggtcatgggcacatgctggaatgcctgggcgataaaccggcgcatttcattctgatcttcgataacggctacttctcagagtttggcaccttctctattactgactggatcggtcacacaccgaaagcgcttctcgccaagaactttggtctgcccgaatcggcttttgatgggtttcccaaagacgaggtctattttgcacgtggcgcggttccaccagccacccctgcagcgcctttacagggacgcaaattgccaccactcacgcataaatacgaactcctcgaacagccgcctcataaagtattcaaaggtggtcgtgaatggcgcgtggatagcacccgttttcccatttccaagactgtaaccggcgttgttcttgatttggaacccggcgcgttacgcgagcttcactggcatcctaatgctgacgagtggcaatatgtgatcgatggcaacattagtgtgacgatgttcggttctcatggccgttaccgcaccgaacagatggagaaaggtgatgtcgggtatattccacaggggtatggccacagcatcgaaaatgtgggagatcgtccttgtcgcgtcttgattggctttaacacaggtaactacgaagccatcgacttatcacaatggattgcaggtaatcccgcggatgttcttgccacgaacttctccaaacccaccagcctctttgaaaagttcccaaaacaggacgtgtttattgctcctggcaagggccaaactggccaccatcaccatcaccat

SEQ ID NO: 136 - protein, 369 aa, synthetic construct
  REGION 1..369: note = Variant of oxalate decarboxylase from Gemmata sp. SH-PL17
MGDRTFMNNVPDHLLADKDLPTFKFALEKSEGKVIGKSSGKEATVVQLPISKGIAGVSMTLEPGAMRELHWHATAAEWAFVLTGHVRTTVIDPQGAAETNDFGPGDVWYFPRGHGHMLECLGDKPAHFILIFDNGYFSEFGTFSITDWIGHTPKALLAKNFGLPESAFDGFPKDEVYFARGAVPPATPAAPLQGRKLPPLTHKYELLEQPPHKVFKGGREWRVDSTRFPISKTVTGVVLDLEPGALRELHWHPNADEWQYVIDGNISVTMFGSHGRYRTEQMEKGDVGYIPQGYGHSIENVGDRPCRVLIGFNTGNYEAIDLSQWIAGNPADVLATNFSKPTSLFEKFPKQDVFIAPGKGQTGHHHHHH

SEQ ID NO: 137 - DNA, 1107 bp, synthetic construct
  misc_feature 1..1107: note = Variant of oxalate decarboxylase from Gemmata sp. SH-PL17
  source 1..1107: mol_type = other DNA
atgggtgatccgacctctatgaataatgtgccagaccatctgctggcggataaagatttgccgacgttcaagtttgccctggaaaagagcgagggcaaagtcattgggaaaagttcgggaaaagaagcaaccgttgttcagttacctatctccaaaggcattgctggtgtgagcatgactcttgaaccgggtgcgatgcgcgaattgcactggcatgccacagcagcagagtgggctttcgtattaaccggccacgtccgtacgacggtgatcgatccacaaggtgcggccgaaaccaacgactttggaccgggcgacgtgtggtattttcctcgcggtcatgggcacatgctggaatgcctgggcgataaaccggcgcatttcattctgatcttcgataacggctacttctcagagtttggcaccttctctattactgactggatcggtcacacaccgaaagcgcttctcgccaagaactttggtctgcccgaatcggcttttgatgggtttcccaaagacgaggtctattttgcacgtggcgcggttccaccagccacccctgcagcgcctttacagggacgcaaattgccaccactcacgcataaatacgaactcctcgaacagccgcctcataaagtattcaaaggtggtcgtgaatggcgcgtggatagcacccgttttcccatttccaagactgtaaccggcgttgttcttgatttggaacccggcgcgttacgcgagcttcactggcatcctaatgctgacgagtggcaatatgtgatcgatggcaacattagtgtgacgatgttcggttctcatggccgttaccgcaccgaacagatggagaaaggtgatgtcgggtatattccacaggggtatggccacagcatcgaaaatgtgggagatcgtccttgtcgcgtcttgattggctttaacacaggtaactacgaagccatcgacttatcacaatggattgcaggtaatcccgcggatgttcttgccacgaacttctccaaacccaccagcctctttgaaaagttcccaaaacaggacgtgtttattgctcctggcaagggccaaactggccaccatcaccatcaccat

SEQ ID NO: 138 - protein, 369 aa, synthetic construct
  REGION 1..369: note = Variant of oxalate decarboxylase from Gemmata sp. SH-PL17
MGDPTSMNNVPDHLLADKDLPTFKFALEKSEGKVIGKSSGKEATVVQLPISKGIAGVSMTLEPGAMRELHWHATAAEWAFVLTGHVRTTVIDPQGAAETNDFGPGDVWYFPRGHGHMLECLGDKPAHFILIFDNGYFSEFGTFSITDWIGHTPKALLAKNFGLPESAFDGFPKDEVYFARGAVPPATPAAPLQGRKLPPLTHKYELLEQPPHKVFKGGREWRVDSTRFPISKTVTGVVLDLEPGALRELHWHPNADEWQYVIDGNISVTMFGSHGRYRTEQMEKGDVGYIPQGYGHSIENVGDRPCRVLIGFNTGNYEAIDLSQWIAGNPADVLATNFSKPTSLFEKFPKQDVFIAPGKGQTGHHHHHH

SEQ ID NO: 139 - DNA, 1107 bp, synthetic construct
  misc_feature 1..1107: note = Variant of oxalate decarboxylase from Gemmata sp. SH-PL17
  source 1..1107: mol_type = other DNA
atgggtgatccgacctttatgaataatgtgccagaccatctgctgtcggataaagatttgccgacgttcaagtttgaactggaaaagagcgagggcaaagtcattgggaaaagttcgggaaaagaagcaaccgttgttcagttacctatctccaaaggcattgctggtgtgagcatgactcttgaaccgggtgcgatgcgcgaattgcactggcatgccacagcagcagagtgggctttcgtattaaccggccacgtccgtacgacggtgatcgacccacaaggtgcggccgaaaccaacgactttggaccgggcgacgtgtggtattttcctcgcggtcatgggcacatgctggaatgcctgggcgataaaccggcgcatttcattctgatcttcgataacggctacttctcagagtttggcaccttctctattactgactggatcggtcacacaccgaaagcgcttctcgccaagaactttggtctgcccgaatcggcttttgatgggtttcccaaagacgaggtctattttgcacgtggcgcggttccaccagccacccctgcagcgcctttacagggacgcaaattgccaccactcacgcataaatacgaactcctcgaacagccgcctcataaagtattcaaaggtggtcgtgaatggcgcgtggatagcacccgttttcccatttccaagactgtaaccggcgttgttcttgatttggagcccggcgcgttacgcgagcttcactggcatcctaatgctgacgagtggcaatatgtgatcgatggcaacattagtgtgacgatgttcggttctcatggccgttaccgcaccgaacagatggagaaaggtgatgtcgggtatattccacaggggtatggccacagcatcgaaaatgtgggagatcgtccttgtcgcgtcttgattggctttaacacaggtaactacgaagccatcgacttatcacaatggattgcaggtaatcccgcggatgttcttgccacgaacttctccaaacccaccagcctctttgaaaagttcccaaaacaggacgtgtttattgctcctggcaagggccaaactggccaccatcaccatcaccat

SEQ ID NO: 140 - protein, 369 aa, synthetic construct
  REGION 1..369: note = Variant of oxalate decarboxylase from Gemmata sp. SH-PL17
MGDPTFMNNVPDHLLSDKDLPTFKFELEKSEGKVIGKSSGKEATVVQLPISKGIAGVSMTLEPGAMRELHWHATAAEWAFVLTGHVRTTVIDPQGAAETNDFGPGDVWYFPRGHGHMLECLGDKPAHFILIFDNGYFSEFGTFSITDWIGHTPKALLAKNFGLPESAFDGFPKDEVYFARGAVPPATPAAPLQGRKLPPLTHKYELLEQPPHKVFKGGREWRVDSTRFPISKTVTGVVLDLEPGALRELHWHPNADEWQYVIDGNISVTMFGSHGRYRTEQMEKGDVGYIPQGYGHSIENVGDRPCRVLIGFNTGNYEAIDLSQWIAGNPADVLATNFSKPTSLFEKFPKQDVFIAPGKGQTGHHHHHH

SEQ ID NO: 141 - DNA, 1107 bp, synthetic construct
  misc_feature 1..1107: note = Variant of oxalate decarboxylase from Gemmata sp. SH-PL17
  source 1..1107: mol_type = other DNA
atgggtgatccgacctttatgaataatgtgccagaccatctgctgtcggataaagatttgccgacgttcaagtttgaactggaaaagagcgagggcaaagtcattgggaaaagttcgggaaaagaagcaaccgttgttcagttacctatctccaaaggcattgctggtgtgagcatgactcttgaaccgggtgctatgcgcgaattgcactggcatgccacagcagcagagtgggctttcgtattaaccggccacgtccgtacgacggtgatcgacccacaaggtgcggccgaaaccaacgactttggaccgggcgacgtgtggtattttcctcgcggtcatgggcacatgctggaatgcctgggcgataaaccggcgcatttcattctgatcttcgataacggctacttctcagagtttggcaccttctctattactgactggatcggtcacacaccgaaagcgcttctcgccaagaactttggtctgcccgaatcggcttttgatgggtttcccaaagacgaggtctattttgcacgtggcgcggttccaccagccacccctgcagcgcctttacagggacgcaaattgccaccactcacgcataaatacgaactcctcgaacagccgcctcataaagtattcaaaggtggtcgtgaatggcgcgtggatagcacccgttttcccatttccaagactgtaaccggcgttgttcttgatttggaccccggcgcgttacgcgagcttcactggcatcctaatgctgacgagtggcaatatgtgatcgatggcaacattagtgtgacgatgttcggttctcatggccgttaccgcaccgaacagatggagaaaggtgatgtcgggtatattccacaggggtatggccacagcatcgaaaatgtgggagatcgtccttgtcgcgtcttgattggctttaacacaggtaactacgaagccatcgacttatcacaatggattgcaggtaatcccgcggatgttcttgccacgaacttcagcaaacccaccagcctctttgaaaagttcccaaaacaggacgtgtttattgctcctggcaagggccaaactggccaccatcaccatcaccat

SEQ ID NO: 142 - protein, 369 aa, synthetic construct
  REGION 1..369: note = Variant of oxalate decarboxylase from Gemmata sp. SH-PL17
MGDPTFMNNVPDHLLSDKDLPTFKFELEKSEGKVIGKSSGKEATVVQLPISKGIAGVSMTLEPGAMRELHWHATAAEWAFVLTGHVRTTVIDPQGAAETNDFGPGDVWYFPRGHGHMLECLGDKPAHFILIFDNGYFSEFGTFSITDWIGHTPKALLAKNFGLPESAFDGFPKDEVYFARGAVPPATPAAPLQGRKLPPLTHKYELLEQPPHKVFKGGREWRVDSTRFPISKTVTGVVLDLDPGALRELHWHPNADEWQYVIDGNISVTMFGSHGRYRTEQMEKGDVGYIPQGYGHSIENVGDRPCRVLIGFNTGNYEAIDLSQWIAGNPADVLATNFSKPTSLFEKFPKQDVFIAPGKGQTGHHHHHH

SEQ ID NO: 143 - DNA, 1107 bp, synthetic construct
  misc_feature 1..1107: note = Variant of oxalate decarboxylase from Gemmata sp. SH-PL17
  source 1..1107: mol_type = other DNA
atgggtgatccgacctttatgaataatgtgccagaccatctgctgtcggataaagatttgccgacgttcaagtttgaactggaaaagagcgagggcaaagtcattgggaaaagttcgggaaaagaagcaaccgttgttcagttacctatctccaaaggcattgctggtgtgagcatgactcttgaaccgggtgcgatgcgcgaattgcactggcatgccacagcagcagagtgggctttcgtattaaccggccacgtccgtacgacggtgatcgacccacaaggtgcggccgaaaccaacgactttggaccgggcgacgtgtggtattttcctcgcggtcatgggcacatgctggaatgcctgggcgacaaaccggcgcatttcattctgatcttcgataacggctacttctcagagtttggcaccttctctattactgactggatcggtcacacaccgaaagcgcttctcgccaagaactttggtctgcccgaatcggcttttgatgggtttcccaaagacgaggtctattttgcacgtggcgcgattccaccagccaccccagcagcgcctttacagggacgcaaattgccaccactcacgcataaatacgaactcctcgaacagccgcctcataaagtattcaaaggtggtcgtgaatggcgcgtggatagcacccgttttcccatttccacgactgtaaccggcgttgttcttgatttggagcccggcgcgttacgcgagcttcactggcatcctaatgctgacgagtggcaatatgtgatcgatggcaacattagtgtgacgatgttcggttctcatggccgttaccgcaccgaacagatggagaaaggtgatgtcgggtatattccacaggggtatggccacagcatcgaaaatgtgggagatcgtccttgtcgcgtcttgattggctttaacacaggtaactacgaagccatcgacttatcacaatggattgcaggtaatcccgcggatgttcttgccacgaacttcagcaaacccaccagcctctttgaaaagttcccaaaacaggacgtgtttattgctcctggcaagggccaaactggccaccatcaccatcaccat

SEQ ID NO: 144 - protein, 369 aa, synthetic construct
  REGION 1..369: note = Variant of oxalate decarboxylase from Gemmata sp. SH-PL17
MGDPTFMNNVPDHLLSDKDLPTFKFELEKSEGKVIGKSSGKEATVVQLPISKGIAGVSMTLEPGAMRELHWHATAAEWAFVLTGHVRTTVIDPQGAAETNDFGPGDVWYFPRGHGHMLECLGDKPAHFILIFDNGYFSEFGTFSITDWIGHTPKALLAKNFGLPESAFDGFPKDEVYFARGAIPPATPAAPLQGRKLPPLTHKYELLEQPPHKVFKGGREWRVDSTRFPISTTVTGVVLDLEPGALRELHWHPNADEWQYVIDGNISVTMFGSHGRYRTEQMEKGDVGYIPQGYGHSIENVGDRPCRVLIGFNTGNYEAIDLSQWIAGNPADVLATNFSKPTSLFEKFPKQDVFIAPGKGQTGHHHHHH

SEQ ID NO: 145 - DNA, 1107 bp, synthetic construct
  misc_feature 1..1107: note = Variant of oxalate decarboxylase from Gemmata sp. SH-PL17
  source 1..1107: mol_type = other DNA
atgggtgatccgacctttatgaataatgtgccagaccatctgctggcggataaagatttgccgacgttcaagtttgccctggaaaagagcgagggcaaagtcattgggaaaagttcgggaaaagaagcaaccgttgttcagttacctatctccaaaggcattgctggtgtgagcatgactcttgaaccgggtgctatgcgcgaattgcactggcatgccacagcagcagagtgggctttcgtattaaccggccacgtccgtacgacggtgatcgacccacaaggtgcggccgaaaccaacgactttggaccgggcgacgtgtggtattttcctcgcggtcatgggcacatgctggaatgcctgggcgataaaccggcgcatttcattctgatcttcgataacggctacttctcagagtttggcaccttctctattactgactggatcggtcacacgccgaaaccgcttctcgccaagaactttggtctgcccgaatcggcttttgatgggtttcccaaagacgaggtctattttgcacgtggcgcggttccaccagccaccccagcagcgcctttacagggacgcaaattgccaccactgacgcataaatacgaaatgctcgaacagccgcctcataaagtattcaaaggtggtcgtgaatggcgcgtggatagcacccgttttcccatttccaagactgtaaccggcgttgttcttgatttggaccccggcgcgttacgcgagcttcactggcatcctaatgctgacgagtggcaatatgtgatcgatggcaacattagtgtgacgatgttcggttctcatggccgttaccgcaccgaacagatggagaaaggtgatgtcgggtatattccacaggggtatggccacagcatcgaaaatgtgggagatcgtccttgtcgcgtcttgattggctttaacacaggtaactacgaagccatcgacttatcacaatggattgcaggtaatcccgcggatgttcttgccacgaacttcagcaaacccaccagcctctttgaaaagttcccaaaacaggacgtgtttattgctcctggcaagggccaaactggccaccatcaccatcaccat

SEQ ID NO: 146 - protein, 369 aa, synthetic construct
  REGION 1..369: note = Variant of oxalate decarboxylase from Gemmata sp. SH-PL17
MGDPTFMNNVPDHLLADKDLPTFKFALEKSEGKVIGKSSGKEATVVQLPISKGIAGVSMTLEPGAMRELHWHATAAEWAFVLTGHVRTTVIDPQGAAETNDFGPGDVWYFPRGHGHMLECLGDKPAHFILIFDNGYFSEFGTFSITDWIGHTPKPLLAKNFGLPESAFDGFPKDEVYFARGAVPPATPAAPLQGRKLPPLTHKYEMLEQPPHKVFKGGREWRVDSTRFPISKTVTGVVLDLDPGALRELHWHPNADEWQYVIDGNISVTMFGSHGRYRTEQMEKGDVGYIPQGYGHSIENVGDRPCRVLIGFNTGNYEAIDLSQWIAGNPADVLATNFSKPTSLFEKFPKQDVFIAPGKGQTGHHHHHH

SEQ ID NO: 147 - DNA, 1107 bp, synthetic construct
  misc_feature 1..1107: note = Variant of oxalate decarboxylase from Gemmata sp. SH-PL17
  source 1..1107: mol_type = other DNA
atgggtgatccgacctttatgaataatgtgccagaccatctgctgtcggataaagatttgccgacgttcaagtttgaactggaaaagagcgagggcaaagtcattgggaaaagttcgggaaaagaagcaaccgttgttcagttacctatctccaaaggcattgctggtgtgagcatgactcttgaaccgggtgctatgcgcgaattgcactggcatgccacagcagcagagtgggctttcgtattaaccggccacgtccgtacgacggtgatcgatccacaaggtgcggccgaaaccaacgactttggaccgggcgacgtgtggtattttcctcgcggtcatgggcacatgctggaatgcctgggcgataaaccggcgcatttcattctgatcttcgataacggctacttctcagagtttggcaccttctctattactgactggatcggtcacacaccgaaagcgcttctcgccaagaactttggtctgcccgaatcggcttttgatgggtttcccaaagacgaggtctattttgcacgtggcgcggttccaccagccacccctgcagcgcctttacagggacgcaaattgccaccactcacgcataaatacgaactcctcgaacagccgcctcataaagtattcaaaggtggtcgtgaatggcgcgtggatagcacccgttttcccatttccaagactgtaaccggcgttgttcttgatttggaacccggcgcgttacgcgagcttcactggcatcctaatgctgacgagtggcaatatgtgatcgatggcaacattagtgtgacgatgttcggttctcatggccgttaccgcaccgaacagatggagaaaggtgatgtcgggtatattccacaggggtatggccacagcatcgaaaatgtgggagatcgtccttgtcgcgtcttgattggctttaacacaggtaactacgaagccatcgacttatcacaatggattgcaggtaatcccgcggatgttcttgccacgaacttcggcaaacccaccagcctctttgaaaagttcccaaaacaggacgtgtttattgctcctggcaagggccaaactggccaccatcaccatcaccat

SEQ ID NO: 148 - protein, 369 aa, synthetic construct
  REGION 1..369: note = Variant of oxalate decarboxylase from Gemmata sp. SH-PL17
MGDPTFMNNVPDHLLSDKDLPTFKFELEKSEGKVIGKSSGKEATVVQLPISKGIAGVSMTLEPGAMRELHWHATAAEWAFVLTGHVRTTVIDPQGAAETNDFGPGDVWYFPRGHGHMLECLGDKPAHFILIFDNGYFSEFGTFSITDWIGHTPKALLAKNFGLPESAFDGFPKDEVYFARGAVPPATPAAPLQGRKLPPLTHKYELLEQPPHKVFKGGREWRVDSTRFPISKTVTGVVLDLEPGALRELHWHPNADEWQYVIDGNISVTMFGSHGRYRTEQMEKGDVGYIPQGYGHSIENVGDRPCRVLIGFNTGNYEAIDLSQWIAGNPADVLATNFGKPTSLFEKFPKQDVFIAPGKGQTGHHHHHH

SEQ ID NO: 149 - DNA, 1107 bp, synthetic construct
  misc_feature 1..1107: note = Variant of oxalate decarboxylase from Gemmata sp. SH-PL17
  source 1..1107: mol_type = other DNA
atgggtgatccgacctttatgaataatgtgccagaccatctgctgtcggataaagatttgccgacgttcaagtttgaactggaaaagagcgagggcaaagtcattgggaaaagttcgggaaaagaagcaaccgttgttcagttacctatctccaaaggcattgctggtgtgagcatgactcttgaaccgggtgctatgcgcgaattgcactggcatgccacagcagcagagtgggctttcgtattaaccggccacgtccgtacgacggtgatcgatccacaaggtgcggccgaaaccaacgactttggaccgggcgacgtgtggtattttcctcgcggtcatgggcacatgctggaatgcctgggcgacaaaccggcgcatttcattctgatcttcgataacggctacttctcagagtttggcaccttctctattactgactggatcggtcacacgccgaaaccgcttctcgccaagaactttggtctgcccgaatcggcttttgatgggtttcccaaagacgaggtctattttgcacgtggcgcggttccaccagccaccccagcagcgcctttacagggacgcaaattgccaccactgacgcataaatacgaaatgctcgaacagccgcctcataaagtattcaaaggtggtcgtgaatggcgcgtggatagcacccgttttcccatttccaagactgtaaccggcgttgttcttgatttggagcccggcgcgttacgcgagcttcactggcatcctaatgctgacgagtggcaatatgtgatcgatggcaacattagtgtgacgatgttcggttctcatggccgttaccgcaccgaacagatggagaaaggtgatgtcgggtatattccacaggggtatggccacagcatcgaaaatgtgggagatcgtccttgtcgcgtcttgattggctttaacacaggtaactacgaagccatcgacttatcacaatggattgcaggtaatcccgcggatgttcttgccacgaacttcggcaaacccaccagcctctttgaaaagttcccaaaacaggacgtgtttattgctcctggcaagggccaaactggccaccatcaccatcaccat

SEQ ID NO: 150 - protein, 369 aa, synthetic construct
  REGION 1..369: note = Variant of oxalate decarboxylase from Gemmata sp. SH-PL17
MGDPTFMNNVPDHLLSDKDLPTFKFELEKSEGKVIGKSSGKEATVVQLPISKGIAGVSMTLEPGAMRELHWHATAAEWAFVLTGHVRTTVIDPQGAAETNDFGPGDVWYFPRGHGHMLECLGDKPAHFILIFDNGYFSEFGTFSITDWIGHTPKPLLAKNFGLPESAFDGFPKDEVYFARGAVPPATPAAPLQGRKLPPLTHKYEMLEQPPHKVFKGGREWRVDSTRFPISKTVTGVVLDLEPGALRELHWHPNADEWQYVIDGNISVTMFGSHGRYRTEQMEKGDVGYIPQGYGHSIENVGDRPCRVLIGFNTGNYEAIDLSQWIAGNPADVLATNFGKPTSLFEKFPKQDVFIAPGKGQTGHHHHHH

SEQ ID NO: 151 - DNA, 1107 bp, synthetic construct
  misc_feature 1..1107: note = Variant of oxalate decarboxylase from Gemmata sp. SH-PL17
  source 1..1107: mol_type = other DNA
atgggtgatccgacctttatgaataatgtgccagaccatctgctggcggataaagatttgccgacgttcaagtttgaactggaaaagagcgagggcaaagtcattgggaaaagttcgggaaaagaagcaaccgttgttcagttacctatctccaaaggcattgctggtgtgagcatgactcttgaaccgggtgctatgcgcgaattgcactggcatgccacagcagcagagtgggctttcgtattaaccggccacgtccgtacgacggtgatcgatccacaaggtgcggccgaaaccaacgactttggaccgggcgacgtgtggtattttcctcgcggtcatgggcacatgctggaatgcctgggcgataaaccggcgcatttcattctgatcttcgataacggctacttctcagagtttggcaccttctctattactgactggatcggtcacacaccgaaagcgcttctcgccaagaactttggtctgcccgaatcggcttttgatgggtttcccaaagacgaggtctattttgcacgtggcgcggttccaccagccacccctgcagcgcctttacagggacgcaaattgccaccactcacgcataaatacgaactcctcgaacagccgcctcataaagtattcaaaggtggtcgtgaatggcgcgtggatagcacccgttttcccatttccaagactgtaaccggcgttgttcttgatttggaacccggcgcgttacgcgagcttcactggcatcctaatgctgacgagtggcaatatgtgatcgatggcaacattagtgtgacgatgttcggttctcatggccgttaccgcaccgaacagatggagaaaggtgatgtcgggtatattccacaggggtatggccacagcatcgaaaatgtgggagatcgtccttgtcgcgtcttgattggctttaacacaggtaactacgaagccatcgacttatcacaatggattgcaggtaatcccgcggatgttcttgccacgaacttctccaaacccaccagcctctttgaaaagttcccaaaacaggacgtgtttattgctcctggcaagggccaaactggccaccatcaccatcaccat

SEQ ID NO: 152 - protein, 369 aa, synthetic construct
  REGION 1..369: note = Variant of oxalate decarboxylase from Gemmata sp. SH-PL17
MGDPTFMNNVPDHLLADKDLPTFKFELEKSEGKVIGKSSGKEATVVQLPISKGIAGVSMTLEPGAMRELHWHATAAEWAFVLTGHVRTTVIDPQGAAETNDFGPGDVWYFPRGHGHMLECLGDKPAHFILIFDNGYFSEFGTFSITDWIGHTPKALLAKNFGLPESAFDGFPKDEVYFARGAVPPATPAAPLQGRKLPPLTHKYELLEQPPHKVFKGGREWRVDSTRFPISKTVTGVVLDLEPGALRELHWHPNADEWQYVIDGNISVTMFGSHGRYRTEQMEKGDVGYIPQGYGHSIENVGDRPCRVLIGFNTGNYEAIDLSQWIAGNPADVLATNFSKPTSLFEKFPKQDVFIAPGKGQTGHHHHHH

SEQ ID NO: 153 - DNA, 1107 bp, synthetic construct
  misc_feature 1..1107: note = Variant of oxalate decarboxylase from Gemmata sp. SH-PL17
  source 1..1107: mol_type = other DNA
atgggtgatccgacctttatgaataatgtgccagaccatctgctggcggataaagatttgccgacgttcaagtttgaactggaaaagagcgagggcaaagtcattgggaaaagttcgggaaaagaagcaaccgttgttcagttacctatctccaaaggcattgctggtgtgagcatgactcttgaaccgggtgctatgcgcgaattgcactggcatgccacagcagcagagtgggctttcgtattaaccggccacgtccgtacgacggtgatcgacccacaaggtgcggccgaaaccaacgactttggaccgggcgacgtgtggtattttcctcgcggtcatgggcacatgctggaatgcctgggcgacaaaccggcgcatttcattctgatcttcgataacggctacttctcagagtttggcaccttctctattactgactggatcggtcacacaccgaaagcgcttctcgccaagaactttggtctgcccgaatcggcttttgatgggtttcccaaagacgaggtctattttgcacgtggcgcggttccaccagccaccccagcagcgcctttacagggacgcaaattgccaccactgacgcataaatacgaaatgctcgaacagccgcctcataaagtattcaaaggtggtcgtgaatggcgcgtggatagcacccgttttcccatttccaagactgtaaccggcgttgttcttgatttggaacccggcgcgttacgcgagcttcactggcatcctaatgctgacgagtggcaatatgtgatcgatggcaacattagtgtgacgatgttcggttctcatggccgttaccgcaccgaacagatggagaaaggtgatgtcgggtatattccacaggggtatggccacagcatcgaaaatgtgggagatcgtccttgtcgcgtcttgattggctttaacacaggtaactacgaagccatcgacttatcacaatggattgcaggtaatcccgcggatgttcttgccacgaacttcggcaaacccaccagcctctttgaaaagttcccaaaacaggacgtgtttattgctcctggcaagggccaaactggccaccatcaccatcaccat

SEQ ID NO: 154 - protein, 369 aa, synthetic construct
  REGION 1..369: note = Variant of oxalate decarboxylase from Gemmata sp. SH-PL17
MGDPTFMNNVPDHLLADKDLPTFKFELEKSEGKVIGKSSGKEATVVQLPISKGIAGVSMTLEPGAMRELHWHATAAEWAFVLTGHVRTTVIDPQGAAETNDFGPGDVWYFPRGHGHMLECLGDKPAHFILIFDNGYFSEFGTFSITDWIGHTPKALLAKNFGLPESAFDGFPKDEVYFARGAVPPATPAAPLQGRKLPPLTHKYEMLEQPPHKVFKGGREWRVDSTRFPISKTVTGVVLDLEPGALRELHWHPNADEWQYVIDGNISVTMFGSHGRYRTEQMEKGDVGYIPQGYGHSIENVGDRPCRVLIGFNTGNYEAIDLSQWIAGNPADVLATNFGKPTSLFEKFPKQDVFIAPGKGQTGHHHHHH

SEQ ID NO: 155 - DNA, 1107 bp, synthetic construct
  misc_feature 1..1107: note = Variant of oxalate decarboxylase from Gemmata sp. SH-PL17
  source 1..1107: mol_type = other DNA
atgggtgatccgacctttatgaataatgtgccagaccatctgctggcggataaagatttgccgacgttcaagtttgccctggaaaagagcaagggcaaagtcattgggaaaagttcgggaaaagaagcaaccgttgttcagttacctatctccaaaggcattgctggtgtgagcatgactcttgaaccgggtgcgatgcgcgaattgcactggcatgccacagcagcagagtgggctttcgtaatcaccggccacgtccgtacgacggtgatcgatccacaaggtgcggccgaaaccaacgactttggaccgggcgacgtgtggtattttcctcgcggtcatgggcacatgctggaatgcctgggcgataaaccggcgcatttcattctgatcttcgataacggctacttctcagagtttggcaccttctctattactgactggatcggtcacacaccgaaagcgcttctcgccaagaactttggtctgcccgaatcggcttttgatgggtttcccaaagacgaggtctattttgcacgtggcgcggttccaccagccacccctgcagcgcctttacagggacgcaaattgccaccactcacgcataaatacgaactcctcgaacaagctcctcataaagttttcaaaggtggtcgtgaatggcgcgtggatagcacccgttttcccatttccaagactgtaaccggcgttgttcttgatttggaacccggcgcgttacgcgagcttcactggcatcctaatgctgacgagtggcaatatgtgatcgatggcaacattagtgtgacgatgttcggttctcatggccgttaccgcaccgaacagatggagaaaggtgatgtcgggtatattccacaggggtatggccacagcatcgaaaatgtgggagatcgtccttgtcgcgtcttgattggctttaacacaggtaactacgaagccatcgacttatcacaatggattgcaggtaatcccgcggatgttcttgccacgaacttctccaaacccaccagcctctttgaaaagttcccaaaacaggacgtgtttattgcgcctggcaagggccaaactggccaccatcaccatcaccat

SEQ ID NO: 156 - protein, 369 aa, synthetic construct
  REGION 1..369: note = Variant of oxalate decarboxylase from Gemmata sp. SH-PL17
MGDPTFMNNVPDHLLADKDLPTFKFALEKSKGKVIGKSSGKEATVVQLPISKGIAGVSMTLEPGAMRELHWHATAAEWAFVITGHVRTTVIDPQGAAETNDFGPGDVWYFPRGHGHMLECLGDKPAHFILIFDNGYFSEFGTFSITDWIGHTPKALLAKNFGLPESAFDGFPKDEVYFARGAVPPATPAAPLQGRKLPPLTHKYELLEQAPHKVFKGGREWRVDSTRFPISKTVTGVVLDLEPGALRELHWHPNADEWQYVIDGNISVTMFGSHGRYRTEQMEKGDVGYIPQGYGHSIENVGDRPCRVLIGFNTGNYEAIDLSQWIAGNPADVLATNFSKPTSLFEKFPKQDVFIAPGKGQTGHHHHHH

SEQ ID NO: 157 - DNA, 1107 bp, synthetic construct
  misc_feature 1..1107: note = Variant of oxalate decarboxylase from Gemmata sp. SH-PL17
  source 1..1107: mol_type = other DNA
atgggtgatccgacctttatgaataatgtgccagaccatctgctggcggataaagatttgccgacgttcaagtttgccctggaaaagagcaagggcaaagtcattgggaaaagttcgggaaaagaagcaaccgttgttcagttacctatctccaaaggcattgctggtgtgagcatgactcttgaaccgggtgcgatgcgcgaattgcactggcatgccacagcagcagagtgggctttcgtaatcaccggccacgtccgtacgacggtgatcgatccacaaggtgcggccgaaaccaacgactttggaccgggcgacgtgtggtattttcctcgcggtcatgggcacatgctggaatgcctgggcgataaaccggcgcatttcattctgatcttcgataacggctacttctcagagtttggcaccttctctattactgactggatcggtcacacaccgaaagcgcttctcgccaagaactttggtctgcccgaatcggcttttgatgggtttcccaaagacgaggtctattttgcacgtggcgcggttccaccagccacccctgcagcgcctttacagggacgcaaattgccaccactcacgcataaatacgaactcctcgaacagccgcctcataaagtattcaaaggtggtcgtgaatggcgcgtggatagcacccgttttcccatttccaagactgtaaccggcgttgttcttgatttggaacccggcgcgttacgcgagcttcactggcatcctaatgctgacgagtggcaatatgtgatcgatggcaacattagtgtgacgatgttcggttctcatggccgttaccgcaccgaacagatggagaaaggtgatgtcgggtatattccacaggggtatggccacagcatcgaaaatgtgggagatcgtccttgtcgcgtcttgattggctttaacacaggtaactacgaagccatcgacttatcacaatggattgcaggtaatcccgcggatgttcttgccacgaacttctccaaacccaccagcctctttgaaaagttcccaaaacaggacgtgtttattgctcctggcaagggccaaactggccaccatcaccatcaccat

SEQ ID NO: 158 - protein, 369 aa, synthetic construct
  REGION 1..369: note = Variant of oxalate decarboxylase from Gemmata sp. SH-PL17
MGDPTFMNNVPDHLLADKDLPTFKFALEKSKGKVIGKSSGKEATVVQLPISKGIAGVSMTLEPGAMRELHWHATAAEWAFVITGHVRTTVIDPQGAAETNDFGPGDVWYFPRGHGHMLECLGDKPAHFILIFDNGYFSEFGTFSITDWIGHTPKALLAKNFGLPESAFDGFPKDEVYFARGAVPPATPAAPLQGRKLPPLTHKYELLEQPPHKVFKGGREWRVDSTRFPISKTVTGVVLDLEPGALRELHWHPNADEWQYVIDGNISVTMFGSHGRYRTEQMEKGDVGYIPQGYGHSIENVGDRPCRVLIGFNTGNYEAIDLSQWIAGNPADVLATNFSKPTSLFEKFPKQDVFIAPGKGQTGHHHHHH

SEQ ID NO: 159 - DNA, 1110 bp, synthetic construct
  misc_feature 1..1110: note = Variant of oxalate decarboxylase from Gemmata sp. SH-PL17
  source 1..1110: mol_type = other DNA
atgggtgatccgacctttatgaataatgtgccagaccatctgctggcggataaagatttgccgacgttcaagtttgccctggaaaagagcaagggcaaagtcattgggaaaagttcgggaaaagaagcaaccgttgttcagttacctatctccaaaggcattgctggtgtgagcatgactcttgaaccgggtgcgatgcgcgaattgcactggcatgccacagcagcagagtgggctttcgtattaaccggccacgtccgtacgacggtgatcgatccacaaggtgcggccgaaaccaacgactttggaccgggcgacgtgtggtattttcctcgcggtcatgggcacatgctggaatgcctgggcgataaaccggcgcatttcattctgatcttcgataacggctacttctcagagtttggcaccttctctattactgactggatcggtcacacaccgaaagcgcttctcgccaagaactttggtctgcccgaatcggcttttgatgggtttcccaaagacgaggtctattttgcacgtggcgcggttccaccagccacccctgctgcgcctttacagggacgcaaattgccaccactcacgcataaatacgaactcctcgaacagcctcctcataaagtattcaaaggtggtcgtgaatggcgcgtggatagcacccgttttcccatttccaagactgtaaccggcgttgttcttgatttggaacccggcgcgttacgcgagcttcactggcatcctaatgctgacgagtggcaatatgtgatcgatggcaacattagtgtgacgatgttcggttctcatggccgttaccgcaccgaacagatggagaaaggtgatgtcgggtatattccacaggggtatggccacagcatcgaaaatgtgggagatcgtccttgtcgcgtcttgattggctttaacacaggtaactacgaagccatcgacttatcacagtggattgcaggtaatcccgcggatgttcttgccacgaacttctccaaacccaccagcctctttgaaaagttcccaaaacaggacgtgtttatttcgcctggcaagggccaaactggccaccatcaccatcaccattag

SEQ ID NO: 160 - protein, 369 aa, synthetic construct
  REGION 1..369: note = Variant of oxalate decarboxylase from Gemmata sp. SH-PL17
MGDPTFMNNVPDHLLADKDLPTFKFALEKSKGKVIGKSSGKEATVVQLPISKGIAGVSMTLEPGAMRELHWHATAAEWAFVLTGHVRTTVIDPQGAAETNDFGPGDVWYFPRGHGHMLECLGDKPAHFILIFDNGYFSEFGTFSITDWIGHTPKALLAKNFGLPESAFDGFPKDEVYFARGAVPPATPAAPLQGRKLPPLTHKYELLEQPPHKVFKGGREWRVDSTRFPISKTVTGVVLDLEPGALRELHWHPNADEWQYVIDGNISVTMFGSHGRYRTEQMEKGDVGYIPQGYGHSIENVGDRPCRVLIGFNTGNYEAIDLSQWIAGNPADVLATNFSKPTSLFEKFPKQDVFISPGKGQTGHHHHHH

SEQ ID NO: 161 - DNA, 1110 bp, synthetic construct
  misc_feature 1..1110: note = Variant of oxalate decarboxylase from Gemmata sp. SH-PL17
  source 1..1110: mol_type = other DNA
atgggtgatccgacctttatgaataatgtgccagaccatctgctggcggataaagatttgccgacgttcaagtttgccctggaaaagagcaagggcaaagtcattgggaaaagttcgggaaaagaagcaaccgttgttcagttacctatctccaaaggcattgctggtgtgagcatgactcttgaaccgggtgcgatgcgcgaattgcactggcatgccacagcagcagagtgggctttcgtactgaccggccacgtccgtacgacggtgatcgatccacaaggtgcgaccgaaaccaacgactttggaccgggcgacgtgtggtattttcctcgcggtcatgggcacatgctggaatgcctgggcgataaaccggcgcatttcattctgatcttcgataacggctacttctcagagtttggcaccttctctattactgactggatcggtcacacaccgaaagcgcttctcgccaagaactttggtctgcccgaatcggcttttgatgggtttcccaaagacgaggtctattttgcacgtggcgcggttccaccagccacccctgctgcgccgttacagggacgcaaattgccaccactcacgcataaatacgaactcctcgaacaacctcctcataaagttttcaaaggtggtcgtgaatggcgcgtggatagctcgcgttttcccatttccaagactgtaaccggcgttgttcttgatttggaacccggcgcgttacgcgagcttcactggcatcctaatgctgacgagtggcaatatgtgatcgatggcaacattagtgtgacgatgttcggttctcatggccgttaccgcaccgaacagatggagaaaggtgatgtcgggtatattccacaggggtatggccacagcatcgaaaatgtgggagatcgtccttgtcgcgtcttgattggctttaacacaggtaactacgaagccatcgacttatcacaatggattgcaggtaatcccgcggatgttcttgccacgaacttctccaaacccaccagcctctttgaaaagttcccaaaacaggacgtgtttattgcgcctggcaagggccaaactggccaccatcaccatcaccattag

SEQ ID NO: 162 - protein, 369 aa, synthetic construct
  REGION 1..369: note = Variant of oxalate decarboxylase from Gemmata sp. SH-PL17
MGDPTFMNNVPDHLLADKDLPTFKFALEKSKGKVIGKSSGKEATVVQLPISKGIAGVSMTLEPGAMRELHWHATAAEWAFVLTGHVRTTVIDPQGATETNDFGPGDVWYFPRGHGHMLECLGDKPAHFILIFDNGYFSEFGTFSITDWIGHTPKALLAKNFGLPESAFDGFPKDEVYFARGAVPPATPAAPLQGRKLPPLTHKYELLEQPPHKVFKGGREWRVDSSRFPISKTVTGVVLDLEPGALRELHWHPNADEWQYVIDGNISVTMFGSHGRYRTEQMEKGDVGYIPQGYGHSIENVGDRPCRVLIGFNTGNYEAIDLSQWIAGNPADVLATNFSKPTSLFEKFPKQDVFIAPGKGQTGHHHHHH

SEQ ID NO: 163 - DNA, 1107 bp, synthetic construct
  misc_feature 1..1107: note = Variant of oxalate decarboxylase from Gemmata sp. SH-PL17
  source 1..1107: mol_type = other DNA
atgggtgatccgacctttatgaataatgtgccagaccatctgctggcggataaagatttgccgacgttcaagtttgccctggaaaagagcaagggcaaagtcattgggaaaagttcgggaaaagaagcaaccgttgttcagttacctatctccaaaggcattgctggtgtgagcatgactcttgaaccgggtgcgatgcgcgaattgcactggcatgccacagcagcagagtgggctttcgtattaaccggccacgtccgtacgacggtgatcgatccacaaggtgcggccgaaaccaacgactttggaccgggcgacgtgtggtattttcctcgcggtcatgggcacatgctggaatgcctgggcgataaaccggcgcatttcattctgatcttcgataacggctacttctcagagtttggcaccttctctattactgactggatcggtcacacaccgaaagcgcttctcgccaagaactttggtctgcccgaatcggcttttgatgggtttcccaaagacgaggtctattttgcacgtggcgcggttccaccagccacccctgcagcgcctttacagggacgcaaattgccaccactcacgcataaatacgaactcctcgaacagccgcctcataaagtattcaaaggtggtcgtgaatggcgcgtggatagcacccgttttcccatttccaagactgtaaccggcgttgttcttgagttggaacccggcgcgttacgcgagcttcactggcatcctaatgctgacgagtggcaatatgtgatcgatggcaacattagtgtgacgctgttcggttctcatggccgttaccgcaccgaacagatggagaaaggtgatgtcgggtatattccacaggggtatggccacagcatcgaaaatgtgggagatcgtccttgtcgcgtcttgattggctttaacacaggtaactacgaagccatcgacttatcacaatggattgcaggtaatcccgcggatgttcttgccacgaacttctccaaacccaccagcctctttgaaaagttcccaaaacaggacgtgtttattgcgcctggcaagggccaaactggccaccatcaccatcaccat

SEQ ID NO: 164 - protein, 369 aa, synthetic construct
  REGION 1..369: note = Variant of oxalate decarboxylase from Gemmata sp. SH-PL17
MGDPTFMNNVPDHLLADKDLPTFKFALEKSKGKVIGKSSGKEATVVQLPISKGIAGVSMTLEPGAMRELHWHATAAEWAFVLTGHVRTTVIDPQGAAETNDFGPGDVWYFPRGHGHMLECLGDKPAHFILIFDNGYFSEFGTFSITDWIGHTPKALLAKNFGLPESAFDGFPKDEVYFARGAVPPATPAAPLQGRKLPPLTHKYELLEQPPHKVFKGGREWRVDSTRFPISKTVTGVVLELEPGALRELHWHPNADEWQYVIDGNISVTLFGSHGRYRTEQMEKGDVGYIPQGYGHSIENVGDRPCRVLIGFNTGNYEAIDLSQWIAGNPADVLATNFSKPTSLFEKFPKQDVFIAPGKGQTGHHHHHH

SEQ ID NO: 165 - DNA, 1110 bp, synthetic construct
  misc_feature 1..1110: note = Variant of oxalate decarboxylase from Gemmata sp. SH-PL17
  source 1..1110: mol_type = other DNA
atgggtgatccgacctttatgaataatgtgccagaccatctgctggcggataaagatttgccgacgttcaagtttgccctggaaaagagcaagggcaaagtcattgggaaaagttcgggaaaagaagcaaccgttgttcagttacctatctccaaaggcattgctggtgtgagcatgactcttgaaccgggtgcgatgcgcgaattgcactggcatgccacagcagcagagtgggctttcgtaatcaccggccacgtccgtacgacggtgatcgatccacaaggtgcggccgaaaccaacgactttggaccgggcgacgtgtggtattttcctcgcggtcatgggcacatgctggaatgcctgggcgataaaccggcgcatttcattctgatcttcgataacggctacttctcagagtttggcaccttctctattactgactggatcggtcacacaccgaaagcgcttctcgccaagaactttggtctgcccgaatcggcttttgatgggtttcccaaagacgaggtctattttgcacgtggcgcggttccaccagccacccctgctgcgccgttacagggacgcaaattgccaccactcacgcataaatacgaactcctcgaacaacctcctcataaagttttcaaaggtggtcgtgaatggcgcgtggatagctcccgttttcccatttccaagactgtaaccggcgttgttcttgatttggaacccggcgcgttacgcgagcttcactggcatcctaatgctgacgagtggcaatatgtgatcgatggcaacattagtgtgacgatgttcggttctcatggccgttaccgcaccgaacagatggagaaaggtgatgtcgggtatattccacaggggtatggccacagcatcgaaaatgtgggagatcgtccttgtcgcgtcttgattggctttaacacaggtaactacgaagccatcgacttatcacaatggattgcaggtaatcccgcggatgttcttgccacgaacttctccaaacccaccagcctctttgaaaagttcccaaaacaggacgtgtttattgcgcctggcaagggccaaactggccaccatcaccatcaccattag

SEQ ID NO: 166 - protein, 369 aa, synthetic construct
  REGION 1..369: note = Variant of oxalate decarboxylase from Gemmata sp. SH-PL17
MGDPTFMNNVPDHLLADKDLPTFKFALEKSKGKVIGKSSGKEATVVQLPISKGIAGVSMTLEPGAMRELHWHATAAEWAFVITGHVRTTVIDPQGAAETNDFGPGDVWYFPRGHGHMLECLGDKPAHFILIFDNGYFSEFGTFSITDWIGHTPKALLAKNFGLPESAFDGFPKDEVYFARGAVPPATPAAPLQGRKLPPLTHKYELLEQPPHKVFKGGREWRVDSSRFPISKTVTGVVLDLEPGALRELHWHPNADEWQYVIDGNISVTMFGSHGRYRTEQMEKGDVGYIPQGYGHSIENVGDRPCRVLIGFNTGNYEAIDLSQWIAGNPADVLATNFSKPTSLFEKFPKQDVFIAPGKGQTGHHHHHH

SEQ ID NO: 167 - DNA, 1110 bp, synthetic construct
  misc_feature 1..1110: note = Variant of oxalate decarboxylase from Gemmata sp. SH-PL17
  source 1..1110: mol_type = other DNA
atgggtgatccgacctttatgaataatgtgccagaccatctgctggcggataaagatttgccgacgttcaagtttgccctggaaaagagcaagggcaaagtcattgggaaaagttcgggaaaagaagcaaccgttgttcagttacctatctccaaaggcattgctggtgtgagcatgactcttgaaccgggtgcgatgcgcgaattgcactggcatgccacagcagcagagtgggctttcgtactgaccggccacgtccgtacgacggtgatcgatccacaaggtgcggccgaaaccaacgactttggaccgggcgacgtgtggtattttcctcgcggtcatgggcacatgctggaatgcctgggcgataaaccggcgcatttcattctgatcttcgataacggctacttctcagagtttggcaccttctctattactgactggatcggtcacacaccgaaagcgcttctcgccaagaactttggtctgcccgaatcggcttttgatgggtttcccaaagacgaggtctattttgcacgtggcgcggttccaccagccacccctgctgcgcctttacagggacgcaaattgccaccactcacgcataaatacgaactcctcgaacaaccgcctcataaagtattcaaaggtggtcgtgaatggcgcgtggatagcacccgttttcccatttccaagactgtaaccggcgttgttcttgagttggaacccggcgcgttacgcgagcttcactggcatcctaatgctgacgagtggcaatatgtgatcgatggcaacattagtgtgacgatgttcggttctcatggccgttaccgcaccgaacagatggagaaaggtgatgtcgggtatattccacaggggtatggccacagcatcgaaaatgtgggagatcgtccttgtcgcgtcttgattggctttaacacaggtaactacgaagccatcgacttatcacaatggattgcaggtaatcccgcggatgttcttgccacgaacttctccaaacccaccagcctctttgaaaagttcccaaaacaggacgtgtttattgctcctggcaagggccaaactggccaccatcaccatcaccattag

SEQ ID NO: 168 - protein, 369 aa, synthetic construct
  REGION 1..369: note = Variant of oxalate decarboxylase from Gemmata sp. SH-PL17
MGDPTFMNNVPDHLLADKDLPTFKFALEKSKGKVIGKSSGKEATVVQLPISKGIAGVSMTLEPGAMRELHWHATAAEWAFVLTGHVRTTVIDPQGAAETNDFGPGDVWYFPRGHGHMLECLGDKPAHFILIFDNGYFSEFGTFSITDWIGHTPKALLAKNFGLPESAFDGFPKDEVYFARGAVPPATPAAPLQGRKLPPLTHKYELLEQPPHKVFKGGREWRVDSTRFPISKTVTGVVLELEPGALRELHWHPNADEWQYVIDGNISVTMFGSHGRYRTEQMEKGDVGYIPQGYGHSIENVGDRPCRVLIGFNTGNYEAIDLSQWIAGNPADVLATNFSKPTSLFEKFPKQDVFIAPGKGQTGHHHHHH

SEQ ID NO: 169 - DNA, 1107 bp, synthetic construct
  misc_feature 1..1107: note = Variant of oxalate decarboxylase from Gemmata sp. SH-PL17
  source 1..1107: mol_type = other DNA
atgggtgatccgacctttatgaataatgtgccagaccatctgctggcggataaagatttgccgacgttcaagtttgccctggaaaagagcaagggcaaagtcattgggaaaagttcgggaaaagaagcaaccgttgttcagttacctatctccaaaggcattgctggtgtgagcatgactcttgaaccgggtgcgatgcgcgaattgcactggcatgccacagcagcagagtgggctttcgtactgaccggccacgtccgtacgacggtgatcgatccacaaggtgcggccgaaaccaacgactttggaccgggcgacgtgtggtattttcctcgcggtcatgggcacatgctggaatgcctgggcgataaaccggcgcatttcattctgatcttcgataacggctacttctcagagtttggcaccttctctattactgactggatcggtcacacaccgaaagcgcttctcgccaagaactttggtctgcccgaatcggcttttgatgggtttcccaaagacgaggtctattttgcacgtggcgcggttccaccagccacccctgcagcgccgttacagggacgcaaattgccaccactcacgcataaatacgaactcctcgaacaacctcctcataaagttttcaaaggtggtcgtgaatggcgcgtggatagcacccgttttcccatttccaagactgtaaccggcgttgttcttgatttggaacccggcgcgttacgcgagcttcactggcatcctaatgctgacgagtggcaatatgtgatcgatggcaacattagtgtgacgatgttcggttctcatggccgttaccgcaccgaacagatggagaaaggtgatgtcgggtatattccacaggggtatggccacagcatcgaaaatgtgggagatcgtccttgtcgcgtcttgattggctttaacacaggtaactacgaagccatcgacttatcacaatggattgcaggtaatcccgcggatgttcttgccacgaacttctccaaacccaccagcctctttgaaaagttcccaaaacaggacgtgtttattgctcctggcaagggccaaactggccaccatcaccatcaccat

SEQ ID NO: 170 - protein, 369 aa, synthetic construct
  REGION 1..369: note = Variant of oxalate decarboxylase from Gemmata sp. SH-PL17
MGDPTFMNNVPDHLLADKDLPTFKFALEKSKGKVIGKSSGKEATVVQLPISKGIAGVSMTLEPGAMRELHWHATAAEWAFVLTGHVRTTVIDPQGAAETNDFGPGDVWYFPRGHGHMLECLGDKPAHFILIFDNGYFSEFGTFSITDWIGHTPKALLAKNFGLPESAFDGFPKDEVYFARGAVPPATPAAPLQGRKLPPLTHKYELLEQPPHKVFKGGREWRVDSTRFPISKTVTGVVLDLEPGALRELHWHPNADEWQYVIDGNISVTMFGSHGRYRTEQMEKGDVGYIPQGYGHSIENVGDRPCRVLIGFNTGNYEAIDLSQWIAGNPADVLATNFSKPTSLFEKFPKQDVFIAPGKGQTGHHHHHH

SEQ ID NO: 171 - DNA, 1110 bp, synthetic construct
  misc_feature 1..1110: note = Variant of oxalate decarboxylase from Gemmata sp. SH-PL17
  source 1..1110: mol_type = other DNA
atgggtgatccgacctttatgaataatgtgccagaccatctgctggcggataaagatttgccgacgttcaagtttgccctggaaaagagcaagggcaaagtcattgggaaaagttcgggaaaagaagcaaccgttgttcagttacctatctccaaaggcattgctggtgtgagcatgactcttgaaccgggtgcgatgcgcgaattgcactggcatgccacagcagcagagtgggctttcgtattaaccggccacgtccgtacgacggtgatcgatccacaaggtgcggccgaaaccaacgactttggaccgggcgacgtgtggtattttcctcgcggtcatgggcacatgctggaatgcctgggcgataaaccggcgcatttcattctgatcttcgataacggctacttctcagagtttggcaccttctctattactgactggatcggtcacacaccgaaagcgcttctcgccaagaactttggtctgcccgaatcggcttttgatgggtttcccaaagacgaggtctattttgcacgtggcgcggttccaccagccacccctgcagcgcctttacagggacgcaaattgccaccactcacgcataaatacgaactcctcgaacaagctcctcataaagttttcaaaggtggtcgtgaatggcgcgtggatagcacccgttttcccatttccaagactgtaaccggcgttgttcttgatttggaacccggcgcgttacgcgagcttcactggcatcctaatgctgacgagtggcaatatgtgatcgatggcaacattagtgtgacgatgttcggttctcatggccgttaccgcaccgaacagatggagaaaggtgatgtcgggtatattccacaggggtatggccacagcatcgaaaatgtgggagatcgtccttgtcgcgtcttgattggctttaacacaggtaactaccaagcgatcgacttatcacagtggattgcaggtaatcccgcggatgttcttgccacgaacttctccaaacccaccagcctctttgaaaagttcccaaaacaggacgtgtttattgctcctggcaagggccaaactggccaccatcaccatcaccattag

SEQ ID NO: 172 - protein, 369 aa, synthetic construct
  REGION 1..369: note = Variant of oxalate decarboxylase from Gemmata sp. SH-PL17
MGDPTFMNNVPDHLLADKDLPTFKFALEKSKGKVIGKSSGKEATVVQLPISKGIAGVSMTLEPGAMRELHWHATAAEWAFVLTGHVRTTVIDPQGAAETNDFGPGDVWYFPRGHGHMLECLGDKPAHFILIFDNGYFSEFGTFSITDWIGHTPKALLAKNFGLPESAFDGFPKDEVYFARGAVPPATPAAPLQGRKLPPLTHKYELLEQAPHKVFKGGREWRVDSTRFPISKTVTGVVLDLEPGALRELHWHPNADEWQYVIDGNISVTMFGSHGRYRTEQMEKGDVGYIPQGYGHSIENVGDRPCRVLIGFNTGNYQAIDLSQWIAGNPADVLATNFSKPTSLFEKFPKQDVFIAPGKGQTGHHHHHH

SEQ ID NO: 173 - DNA, 1110 bp, synthetic construct
  misc_feature 1..1110: note = Variant of oxalate decarboxylase from Gemmata sp. SH-PL17
  source 1..1110: mol_type = other DNA
atgggtgatccgacctttatgaataatgtgccagaccatctgctggcggataaagatttgccgacgttcaagtttgccctggaaaagagcaagggcaaagtcattgggaaaagttcgggaaaagaagcaaccgttgttcagttacctatctccaaaggcattgctggtgtgagcatgactcttgaaccgggtgcgatgcgcgaattgcactggcatgccacagcagcagagtgggctttcgtactgaccggccacgtccgtacgacggtgatcgatccacaaggtgcggccgaaaccaacgactttggaccgggcgacgtgtggtattttcctcgcggtcatgggcacatgctggaatgcctgggcgataaaccggcgcatttcattctgatcttcgataacggctacttctcagagtttggcaccttctctattactgactggatcggtcacacaccgaaagcgcttctcgccaagaactttggtctgcccgaatcggcttttgatgggtttcccaaagacgaggtctattttgcacgtggcgcggttccaccagccacccctgctgcgccgttacagggacgcaaattgccaccactcacgcataaatacgaactcctcgaacaagctcctcataaagttttcaaaggtggtcgtgaatggcgcgtggatagcacgcgttttcccatttccaagactgtaaccggcgttgttcttgatttggaacccggcgcgttacgcgagcttcactggcatcctaatgctgacgagtggcaatatgtgatcgatggcaacattagtgtgacgatgttcggttctcatggccgttaccgcaccgaacagatggagaaaggtgatgtcgggtatattccacaggggtatggccacagcatcgaaaatgtgggagatcgtccttgtcgcgtcttgattggctttaacacaggtaactacgaagccatcgacttatcacaatggattgcaggtaatcccgcggatgttcttgccacgaacttctccaaacccaccagcctctttgaaaagttcccaaaacaggacgtgtttattgcgcctggcaagggccaaactggccaccatcaccatcaccattag

SEQ ID NO: 174 - protein, 369 aa, synthetic construct
  REGION 1..369: note = Variant of oxalate decarboxylase from Gemmata sp. SH-PL17
MGDPTFMNNVPDHLLADKDLPTFKFALEKSKGKVIGKSSGKEATVVQLPISKGIAGVSMTLEPGAMRELHWHATAAEWAFVLTGHVRTTVIDPQGAAETNDFGPGDVWYFPRGHGHMLECLGDKPAHFILIFDNGYFSEFGTFSITDWIGHTPKALLAKNFGLPESAFDGFPKDEVYFARGAVPPATPAAPLQGRKLPPLTHKYELLEQAPHKVFKGGREWRVDSTRFPISKTVTGVVLDLEPGALRELHWHPNADEWQYVIDGNISVTMFGSHGRYRTEQMEKGDVGYIPQGYGHSIENVGDRPCRVLIGFNTGNYEAIDLSQWIAGNPADVLATNFSKPTSLFEKFPKQDVFIAPGKGQTGHHHHHH

SEQ ID NO: 175 - DNA, 1107 bp, synthetic construct
  misc_feature 1..1107: note = Variant of oxalate decarboxylase from Gemmata sp. SH-PL17
  source 1..1107: mol_type = other DNA
atgggtgatccgacctttatgaataatgtgccagacccgctgctggcggataaagatttgccgacgttcaagtttgccctggaaaagagcaagggcaaagtcattgggaaaagttcgggaaaagaagcaaccgttgttcagttacctatctccaaaggcattgctggtgtgagcatgactcttgaaccgggtgcgatgcgcgaattgcactggcatgccacagcagcagagtgggctttcgtattaaccggccacgtccgtacgacggtgatcgatccacaaggtgcggccgaaaccaacgactttggaccgggcgacgtgtggtattttcctcgcggtcatgggcacatgctggaatgcctgggcgataaaccggcgcatttcattctgatcttcgataacggctacttctcagagtttggcaccttctctattactgactggatcggtcacacaccgaaagcgcttctcgccaagaactttggtctgcccgaatcggcttttgatgggtttcccaaagacgaggtctattttgcacgtggcgcggttccaccagccacccctgcagcgcctttacagggacgcaaattgccaccactcacgcataaatacgaactcctcgaacaagctcctcataaagttttcaaaggtggtcgtgaatggcgcgtggatagcacccgttttcccatttccaagactgtaaccggcgttgttcttgatttggaacccggcgcgttacgcgagcttcactggcatcctaatgctgacgagtggcaatatgtgatcgatggcaacattagtgtgacgatgttcggttctcatggccgttaccgcaccgaacagatggagaaaggtgatgtcgggtatattccacaggggtatggccacagcatcgaaaatgtgggagatcgtccttgtcgcgtcttgattggctttaacacaggtaactaccaagcgatcgacttatcacagtggattgcaggtaatcccgcggatgttcttgccacgaacttctccaaacccaccagcctctttgaaaagttcccaaaacaggacgtgtttattgctcctggcaagggccaaactggccaccatcaccatcaccat

SEQ ID NO: 176 - protein, 369 aa, synthetic construct
  REGION 1..369: note = Variant of oxalate decarboxylase from Gemmata sp. SH-PL17
MGDPTFMNNVPDPLLADKDLPTFKFALEKSKGKVIGKSSGKEATVVQLPISKGIAGVSMTLEPGAMRELHWHATAAEWAFVLTGHVRTTVIDPQGAAETNDFGPGDVWYFPRGHGHMLECLGDKPAHFILIFDNGYFSEFGTFSITDWIGHTPKALLAKNFGLPESAFDGFPKDEVYFARGAVPPATPAAPLQGRKLPPLTHKYELLEQAPHKVFKGGREWRVDSTRFPISKTVTGVVLDLEPGALRELHWHPNADEWQYVIDGNISVTMFGSHGRYRTEQMEKGDVGYIPQGYGHSIENVGDRPCRVLIGFNTGNYQAIDLSQWIAGNPADVLATNFSKPTSLFEKFPKQDVFIAPGKGQTGHHHHHH

SEQ ID NO: 177 - DNA, 1107 bp, synthetic construct
  misc_feature 1..1107: note = Variant of oxalate decarboxylase from Gemmata sp. SH-PL17
  source 1..1107: mol_type = other DNA
atgggtgatccgacctttatgaataatgtgccagaccatctgctggcggataaagatttgccgacgttcaagtttgccctggaaaagagcaagggcaaagtcattgggaaaagttcgggaaaagaagcaaccgttgttcagttacctatctccaaaggcattgctggtgtgagcatgactcttgaaccgggtgcgatgcgcgaattgcactggcatgccacagcagcagagtgggctttcgtattaaccggccacgtccgtacgacggtgatcgatccacaaggtgcggccgaaaccaacgactttggaccgggcgacgtgtggtattttcctcgcggtcatgggcacatgctggaatgcctgggcgataaaccggcgcatttcattctgatcttcgataacggctacttctcagagtttggcaccttctctattactgactggatcggtcacacaccgaaagcgcttctcgccaagaactttggtctgcccgaatcggcttttgatgggtttcccaaagacgaggtctattttgcacgtggcgcggttccaccagccacccctgcagcgcctttacagggacgcaaattgccaccactcacgcataaatacgaactcctcgaacaagctcctagtaaagttttcaaaggtggtcgtgaatggcgcgtggatagcacccgttttcccatttccaagactgtaaccggcgttgttcttgatttggaacccggcgcgttacgcgagcttcactggcatcctaatgctgacgagtggcaatatgtgatcgatggcaacattagtgtgacgatgttcggttctcatggccgttaccgcaccgaacagatggagaaaggtgatgtcgggtatattccacaggggtatggccacagcatcgaaaatgtgggagatcgtccttgtcgcgtcttgattggctttaacacaggtaactaccaagcgatcgacttatcacagtggattgcaggtaatcccgcggatgttcttgccacgaacttctccaaacccaccagcctctttgaaaagttcccaaaacaggacgtgtttattgctcctggcaagggccaaactggccaccatcaccatcaccat

SEQ ID NO: 178 - protein, 369 aa, synthetic construct
  REGION 1..369: note = Variant of oxalate decarboxylase from Gemmata sp. SH-PL17
MGDPTFMNNVPDHLLADKDLPTFKFALEKSKGKVIGKSSGKEATVVQLPISKGIAGVSMTLEPGAMRELHWHATAAEWAFVLTGHVRTTVIDPQGAAETNDFGPGDVWYFPRGHGHMLECLGDKPAHFILIFDNGYFSEFGTFSITDWIGHTPKALLAKNFGLPESAFDGFPKDEVYFARGAVPPATPAAPLQGRKLPPLTHKYELLEQAPSKVFKGGREWRVDSTRFPISKTVTGVVLDLEPGALRELHWHPNADEWQYVIDGNISVTMFGSHGRYRTEQMEKGDVGYIPQGYGHSIENVGDRPCRVLIGFNTGNYQAIDLSQWIAGNPADVLATNFSKPTSLFEKFPKQDVFIAPGKGQTGHHHHHH

SEQ ID NO: 179 - DNA, 1107 bp, synthetic construct
  misc_feature 1..1107: note = Variant of oxalate decarboxylase from Gemmata sp. SH-PL17
  source 1..1107: mol_type = other DNA
atgggtgatccgacctttatgaataatgtgccagaccatctgctggcggataaagatttgccgacgttcaagtttgcactggaaaagagcaagggcaaagtcattgggaaaagttcgggaaaagaagcaaccgttgttcagttacctatctccaaaggcattgctggtgtgagcatgactcttgaaccgggtgcgatgcgcgaattgcactggcatgccacagcagcagagtgggctttcgtattaaccggccacgtccgtacgacggtgatcgatccacaaggtgcggccgaaaccaacgactttggaccgggcgacgtgtggtattttcctcgcggtcatgggcacatgctggaatgcctgggcgatgcaccggcgcatttcattctgatcttcgataacggctacttctcagagtttggcaccttctctattactgactggatcggtcacacaccgaaagcgcttctcgccaagaactttggtctgcccgaatcggcttttgatgggtttcccaaagatgaggtctattttgcacgtggcgcggttccaccagccacccctgcagcgcctttacagggacgtgtattgccaccactcacgcataaatacgaactcctcgaacaagaacctcataaagttttcaaaggtggtcgtgaatggcgcgtggatagctcgcgttttcccatttccaagactgtaaccggcgttgttcttgatttggaacccggcgcgttacgcgagcttcactggcatcctaatgctgacgagtggcaatatgtgatcgatggcaacattagtgtgacgatgttcggttctcatggccgttaccgcaccgaacagatggagaagggtgatgtcgggtatattccacaggggtatggccacagcatcgaaaatgtgggagatcgtccttgtcgcgtcttgattggctttaacacaggtaactaccaagcgatcgacttatcacagtggattgcaggtaatcccgcggatgttcttgccacgaacttctccaaacccaccagcctctttgaaaagttcccaaaacaggacgtgtttattgctcctggcaagggccaaactggccaccatcaccatcaccat

SEQ ID NO: 180 - protein, 369 aa, synthetic construct
  REGION 1..369: note = Variant of oxalate decarboxylase from Gemmata sp. SH-PL17
MGDPTFMNNVPDHLLADKDLPTFKFALEKSKGKVIGKSSGKEATVVQLPISKGIAGVSMTLEPGAMRELHWHATAAEWAFVLTGHVRTTVIDPQGAAETNDFGPGDVWYFPRGHGHMLECLGDAPAHFILIFDNGYFSEFGTFSITDWIGHTPKALLAKNFGLPESAFDGFPKDEVYFARGAVPPATPAAPLQGRVLPPLTHKYELLEQEPHKVFKGGREWRVDSSRFPISKTVTGVVLDLEPGALRELHWHPNADEWQYVIDGNISVTMFGSHGRYRTEQMEKGDVGYIPQGYGHSIENVGDRPCRVLIGFNTGNYQAIDLSQWIAGNPADVLATNFSKPTSLFEKFPKQDVFIAPGKGQTGHHHHHH

SEQ ID NO: 181 - DNA, 1107 bp, synthetic construct
  misc_feature 1..1107: note = Variant of oxalate decarboxylase from Gemmata sp. SH-PL17
  source 1..1107: mol_type = other DNA
atgggtgatccgtcttttatgaataatgtgccagaccatctgctggcggataaagatttgccgacgttcaagtttgccctggaaaagagcaagggcaaagtcattgggaaaagttcgggaaaagaagcaaccgttgttcagttacctatctccaaaggcattgctggtgtgagcatgactcttgaaccgggtgcgatgcgcgaattgcactggcatgccacagcagcagagtgggctttcgtattaaccggccacgtccgtacgacggtgatcgatccacaaggtgcggccgaaaccaacgactttggaccgggcgacgtgtggtattttcctcgcggtcatgggcacatgctggaatgcctgggcgataaaccggcgcatttcattctgatcttcgataacggctacttctcagagtttggcaccttctctattactgactggatcggtcacacaccgaaagcgcttctcgccaagaactttggtctgcccgaatcggcttttgatgggtttcccaaagacgaggtctattttgcacgtggcgcggttccaccagccacccctgcagcgcctttacagggacgcaaattgccaccactcacgcataaatacgaactcctcgaacaagctcctcataaagttttcaaaggtggtcgtgaatggcgcgtggatagcacccgttttcccatttccaagactgtaaccggcgttgttcttgatttggaacccggcgcgttacgcgagcttcactggcatcctaatgctgacgagtggcaatatgtgatcgatggcaacattagtgtgacgatgttcggttctcatggccgttaccgcaccgaacagatggagaaaggtgatgtcgggtatattccacaggggtatggccacagcatcgaaaatgtgggagatcgtccttgtcgcgtcttgattggctttaacacaggtaactaccaagcgatcgacttatcacagtggattgcaggtaatcccgcggatgttcttgccacgaacttctccaaacccaccagcctctttgaaaagttcccaaaacaggacgtgtttattgctcctggcaagggccaaactggccaccatcaccatcaccat

SEQ ID NO: 182 - protein, 369 aa, synthetic construct
  REGION 1..369: note = Variant of oxalate decarboxylase from Gemmata sp. SH-PL17
MGDPSFMNNVPDHLLADKDLPTFKFALEKSKGKVIGKSSGKEATVVQLPISKGIAGVSMTLEPGAMRELHWHATAAEWAFVLTGHVRTTVIDPQGAAETNDFGPGDVWYFPRGHGHMLECLGDKPAHFILIFDNGYFSEFGTFSITDWIGHTPKALLAKNFGLPESAFDGFPKDEVYFARGAVPPATPAAPLQGRKLPPLTHKYELLEQAPHKVFKGGREWRVDSTRFPISKTVTGVVLDLEPGALRELHWHPNADEWQYVIDGNISVTMFGSHGRYRTEQMEKGDVGYIPQGYGHSIENVGDRPCRVLIGFNTGNYQAIDLSQWIAGNPADVLATNFSKPTSLFEKFPKQDVFIAPGKGQTGHHHHHH

SEQ ID NO: 183 - DNA, 1107 bp, synthetic construct
  misc_feature 1..1107: note = Variant of oxalate decarboxylase from Gemmata sp. SH-PL17
  source 1..1107: mol_type = other DNA
atgggtgatccgacctttatgaataatgtgccagacgagctgctggcggataaagatttgccgacgttcaagtttgccctggaaaagagcaagggcaaagtcattgggaaaagttcgggaaaagaagcaaccgttgttcagttacctatctccaaaggcattgctggtgtgagcatgactcttgaaccgggtgcgatgcgcgaattgcactggcatgccacagcagcagagtgggctttcgtattaaccggccacgtccgtacgacggtgatcgatccacaaggtgcggccgaaaccaacgactttggaccgggcgacgtgtggtattttcctcgcggtcatgggcacatgctggaatgcctgggcgataaaccggcgcatttcattctgatcttcgataacggctacttctcagagtttggcaccttctctattactgactggatcggtcacacaccgaaagcgcttctcgccaagaactttggtctgcccgaatcggcttttgatgggtttcccaaagacgaggtctattttgcacgtggcgcggttccaccagccacccctgcagcgcctttacagggacgcaaattgccaccactcacgcataaatacgaactcctcgaacaagctcctcataaagttttcaaaggtggtcgtgaatggcgcgtggatagcacccgttttcccatttccaagactgtaaccggcgttgttcttgatttggaacccggcgcgttacgcgagcttcactggcatcctaatgctgacgagtggcaatatgtgatcgatggcaacattagtgtgacgatgttcggttctcatggccgttaccgcaccgaacagatggagaaaggtgatgtcgggtatattccacaggggtatggccacagcatcgaaaatgtgggagatcgtccttgtcgcgtcttgattggctttaacacaggtaactaccaagcgatcgacttatcacagtggattgcaggtaatcccgcggatgttcttgccacgaacttctccaaacccaccagcctctttgaaaagttcccaaaacaggacgtgtttattgctcctggcaagggccaaactggccaccatcaccatcaccat

SEQ ID NO: 184 - protein, 369 aa, synthetic construct
  REGION 1..369: note = Variant of oxalate decarboxylase from Gemmata sp. SH-PL17
MGDPTFMNNVPDELLADKDLPTFKFALEKSKGKVIGKSSGKEATVVQLPISKGIAGVSMTLEPGAMRELHWHATAAEWAFVLTGHVRTTVIDPQGAAETNDFGPGDVWYFPRGHGHMLECLGDKPAHFILIFDNGYFSEFGTFSITDWIGHTPKALLAKNFGLPESAFDGFPKDEVYFARGAVPPATPAAPLQGRKLPPLTHKYELLEQAPHKVFKGGREWRVDSTRFPISKTVTGVVLDLEPGALRELHWHPNADEWQYVIDGNISVTMFGSHGRYRTEQMEKGDVGYIPQGYGHSIENVGDRPCRVLIGFNTGNYQAIDLSQWIAGNPADVLATNFSKPTSLFEKFPKQDVFIAPGKGQTGHHHHHH

SEQ ID NO: 185 - DNA, 1107 bp, synthetic construct
  misc_feature 1..1107: note = Variant of oxalate decarboxylase from Gemmata sp. SH-PL17
  source 1..1107: mol_type = other DNA
atgggtgatccgacctttatgaataatgtgccagaccatctgctgtcggataaagatttgccgacgttcaagtttgaactggaaaagagcaagggcaaagtcattgggaaaagttcgggaaaagaagcaaccgttgttcagttacctatctccaaaggcattgctggtgtgagcatgactcttgaaccgggtgcgatgcgcgaattgcactggcatgccacagcagcagagtgggctttcgtattaaccggccacgtccgtacgacggtgatcgatccacaaggtgcggccgaaaccaacgactttggaccgggcgacgtgtggtattttcctcgcggtcatgggcacatgctggaatgcctgggcgatgcaccggcgcatttcattctgatcttcgataacggctacttctcagagtttggcaccttctctattactgactggatcggtcacacaccgaaaccgcttctcgccaagaactttggtctgcccgaatcggcttttgatgggtttcccaaagatgaggtctattttgcacgtggcgcggttccaccagccacccctgcagcgcctttacagggactgaagttgccaccactcacgcataaatacgaactcctcgaacaagaacctcataaagttttcaaaggtggtcgtgaatggcgcgtggatagcacgcgttttcccatttccaagactgtaaccggcgttgttcttgatttggaacccggcgcgttacgcgagcttcactggcatcctaatgctgacgagtggcaatatgtgatcgatggcaacattagtgtgacgatgttcggttctcatggccgttaccgcaccgaacagatggaggcgggtgatgtcgggtatattccacaggggtatggccacagcatcgaaaatgtgggagatcgtccttgtcgcgtcttgattggctttaacacaggtaactaccaagcgatcgacttatcacagtggattgcaggtaatcccgcggatgttcttgccacgaacttctccaaacccaccagcctctttgaaaagttcccaaaacaggacgtgtttattgctcctggcaagggccaaactggccaccatcaccatcaccat

SEQ ID NO: 186 - protein, 369 aa, synthetic construct
  REGION 1..369: note = Variant of oxalate decarboxylase from Gemmata sp. SH-PL17
MGDPTFMNNVPDHLLSDKDLPTFKFELEKSKGKVIGKSSGKEATVVQLPISKGIAGVSMTLEPGAMRELHWHATAAEWAFVLTGHVRTTVIDPQGAAETNDFGPGDVWYFPRGHGHMLECLGDAPAHFILIFDNGYFSEFGTFSITDWIGHTPKPLLAKNFGLPESAFDGFPKDEVYFARGAVPPATPAAPLQGLKLPPLTHKYELLEQEPHKVFKGGREWRVDSTRFPISKTVTGVVLDLEPGALRELHWHPNADEWQYVIDGNISVTMFGSHGRYRTEQMEAGDVGYIPQGYGHSIENVGDRPCRVLIGFNTGNYQAIDLSQWIAGNPADVLATNFSKPTSLFEKFPKQDVFIAPGKGQTGHHHHHH

SEQ ID NO: 187 - DNA, 1107 bp, synthetic construct
  misc_feature 1..1107: note = Variant of oxalate decarboxylase from Gemmata sp. SH-PL17
  source 1..1107: mol_type = other DNA
atgggtgatccgacctttatgaataatgtgccagaccatctgctggcggataaagatttgccgacgttcaagtttgcactggaaaagagcaagggcaaagtcattgggaaaagttcgggaaaagaagcaaccgttgttcagttacctatctccaaaggcattgctggtgtgagcatgactcttgaaccgggtgcgatgcgcgaattgcactggcatgccacagcagcagagtgggctttcgtattaaccggccacgtccgtacgacggtgatcgatccacaaggtgcggccgaaaccaacgactttggaccgggcgacgtgtggtattttcctcgcggtcatgggcacatgctggaatgcctgggcgataaaccggcgcatttcattctgatcttcgataacggctacttctcagagtttggcaccttctctattactgactggatcggtcacacaccgaaagcgcttctcgccaagaactttggtctgcccgaatcggcttttgatgggtttcccaaagatgaggtctattttgcacgtggcgcggttccaccagccacccctgcagcgcctttacagggacgtgtattgccaccactcacgcataaatacgaactcctcgaacaagctcctcataaagttttcaaaggtggtcgtgaatggcgcgtggatagctcgcgttttcccatttccaagactgtaaccggcgttgttcttgatttggaacccggcgcgttacgcgagcttcactggcatcctaatgctgacgagtggcaatatgtgatcgatggcaacattagtgtgacgatgttcggttctcatggccgttaccgcaccgaacagatggagaagggtgatgtcgggtatattccacaggggtatggccacagcatcgaaaatgtgggagatcgtccttgtcgcgtcttgattggctttaacacaggtaactaccaagcgatcgacttatcacagtggattgcaggtaatcccgcggatgttcttgccacgaacttctccaaacccaccagcctctttgaaaagttcccaaaacaggacgtgtttattgctcctggcaagggccaaactggccaccatcaccatcaccat

SEQ ID NO: 188 - protein, 369 aa, synthetic construct
  REGION 1..369: note = Variant of oxalate decarboxylase from Gemmata sp. SH-PL17
MGDPTFMNNVPDHLLADKDLPTFKFALEKSKGKVIGKSSGKEATVVQLPISKGIAGVSMTLEPGAMRELHWHATAAEWAFVLTGHVRTTVIDPQGAAETNDFGPGDVWYFPRGHGHMLECLGDKPAHFILIFDNGYFSEFGTFSITDWIGHTPKALLAKNFGLPESAFDGFPKDEVYFARGAVPPATPAAPLQGRVLPPLTHKYELLEQAPHKVFKGGREWRVDSSRFPISKTVTGVVLDLEPGALRELHWHPNADEWQYVIDGNISVTMFGSHGRYRTEQMEKGDVGYIPQGYGHSIENVGDRPCRVLIGFNTGNYQAIDLSQWIAGNPADVLATNFSKPTSLFEKFPKQDVFIAPGKGQTGHHHHHH

SEQ ID NO: 189 - DNA, 1107 bp, synthetic construct
  misc_feature 1..1107: note = Variant of oxalate decarboxylase from Gemmata sp. SH-PL17
  source 1..1107: mol_type = other DNA
atgggtgatccgacctttatgaataatgtgccagaccatctgctgtcggataaagatttgccgacgttcaagtttgcactggaaaagagcaagggcaaagtcattgggaaaagttcgggaaaagaagcaaccgttgttcagttacctatctccaaaggcattgctggtgtgagcatgactcttgaaccgggtgcgatgcgcgaattgcactggcatgccacagcagcagagtgggctttcgtattaaccggccacgtccgtacgacggtgatcgatccacaaggtgcggccgaaaccaacgactttggaccgggcgacgtgtggtattttcctcgcggtcatgggcacatgctggaatgcctgggcgataaaccggcgcatttcattctgatcttcgataacggctacttctcagagtttggcaccttctctattactgactggatcggtcacacaccgaaaccgcttctcgccaagaactttggtctgcccgaatcggcttttgatgggtttcccaaagatgaggtctattttgcacgtggcgcggttccaccagccacccctgcagcgcctttacagggactgaagttgccaccactcacgcataaatacgaactcctcgaacaagaacctcataaagttttcaaaggtggtcgtgaatggcgcgtggatagctcgcgttttcccatttccaagactgtaaccggcgttgttcttgatttggaacccggcgcgttacgcgagcttcactggcatcctaatgctgacgagtggcaatatgtgatcgatggcaacattagtgtgacgatgttcggttctcatggccgttaccgcaccgaacagatggagaagggtgatgtcgggtatattccacaggggtatggccacagcatcgaaaatgtgggagatcgtccttgtcgcgtcttgattggctttaacacaggtaactaccaagcgatcgacttatcacagtggattgcaggtaatcccgcggatgttcttgccacgaacttctccaaacccaccagcctctttgaaaagttcccaaaacaggacgtgtttattgctcctggcaagggccaaactggccaccatcaccatcaccat

SEQ ID NO: 190 - protein, 369 aa, synthetic construct
  REGION 1..369: note = Variant of oxalate decarboxylase from Gemmata sp. SH-PL17
MGDPTFMNNVPDHLLSDKDLPTFKFALEKSKGKVIGKSSGKEATVVQLPISKGIAGVSMTLEPGAMRELHWHATAAEWAFVLTGHVRTTVIDPQGAAETNDFGPGDVWYFPRGHGHMLECLGDKPAHFILIFDNGYFSEFGTFSITDWIGHTPKPLLAKNFGLPESAFDGFPKDEVYFARGAVPPATPAAPLQGLKLPPLTHKYELLEQEPHKVFKGGREWRVDSSRFPISKTVTGVVLDLEPGALRELHWHPNADEWQYVIDGNISVTMFGSHGRYRTEQMEKGDVGYIPQGYGHSIENVGDRPCRVLIGFNTGNYQAIDLSQWIAGNPADVLATNFSKPTSLFEKFPKQDVFIAPGKGQTGHHHHHH

SEQ ID NO: 191 - DNA, 1107 bp, synthetic construct
  misc_feature 1..1107: note = Variant of oxalate decarboxylase from Gemmata sp. SH-PL17
  source 1..1107: mol_type = other DNA
atgggtgatccgacctttatgaataatgtgccagaccatctgctgtcggataaagatttgccgacgttcaagtttgcactggaaaagagcaagggcaaagtcattgggaaaagttcgggaaaagaagcaaccgttgttcagttacctatctccaaaggcattgctggtgtgagcatgactcttgaaccgggtgcgatgcgcgaattgcactggcatgccacagcagcagagtgggctttcgtattaaccggccacgtccgtacgacggtgatcgatccacaaggtgcggccgaaaccaacgactttggaccgggcgacgtgtggtattttcctcgcggtcatgggcacatgctggaatgcctgggcgataaaccggcgcatttcattctgatcttcgataacggctacttctcagagtttggcaccttctctattactgactggatcggtcacacaccgaaagcgcttctcgccaagaactttggtctgcccgaatcggcttttgatgggtttcccaaagacgaggtctattttgcacgtggcgcggttccaccagccacccctgcagcgcctttacagggactgaagttgccaccactcacgcataaatacgaactcctcgaacaagaacctcataaagttttcaaaggtggtcgtgaatggcgcgtggatagctcgcgttttcccatttccaagactgtaaccggcgttgttcttgatttggaacccggcgcgttacgcgagcttcactggcatcctaatgctgacgagtggcaatatgtgatcgatggcaacattagtgtgacgatgttcggttctcatggccgttaccgcaccgaacagatggagaagggtgatgtcgggtatattccacaggggtatggccacagcatcgaaaatgtgggagatcgtccttgtcgcgtcttgattggctttaacacaggtaactaccaagcgatcgacttatcacagtggattgcaggtaatcccgcggatgttcttgccacgaacttctccaaacccaccagcctctttgaaaagttcccaaaacaggacgtgtttattgctcctggcaagggccaaactggccaccatcaccatcaccat

SEQ ID NO: 192 - protein, 369 aa, synthetic construct
  REGION 1..369: note = Variant of oxalate decarboxylase from Gemmata sp. SH-PL17
MGDPTFMNNVPDHLLSDKDLPTFKFALEKSKGKVIGKSSGKEATVVQLPISKGIAGVSMTLEPGAMRELHWHATAAEWAFVLTGHVRTTVIDPQGAAETNDFGPGDVWYFPRGHGHMLECLGDKPAHFILIFDNGYFSEFGTFSITDWIGHTPKALLAKNFGLPESAFDGFPKDEVYFARGAVPPATPAAPLQGLKLPPLTHKYELLEQEPHKVFKGGREWRVDSSRFPISKTVTGVVLDLEPGALRELHWHPNADEWQYVIDGNISVTMFGSHGRYRTEQMEKGDVGYIPQGYGHSIENVGDRPCRVLIGFNTGNYQAIDLSQWIAGNPADVLATNFSKPTSLFEKFPKQDVFIAPGKGQTGHHHHHH

SEQ ID NO: 193 - DNA, 1107 bp, synthetic construct
  misc_feature 1..1107: note = Variant of oxalate decarboxylase from Gemmata sp. SH-PL17
  source 1..1107: mol_type = other DNA
atgggtgatccgacctttatgaataatgtgccagaccatctgctgtcggataaagatttgccgacgttcaagtttgccctggaaaagagcaagggcaaagtcattgggaaaagttcgggaaaagaagcaaccgttgttcagttacctatctccaaaggcattgctggtgtgagcatgactcttgaaccgggtgcgatgcgcgaattgcactggcatgccacagcagcagagtgggctttcgtattaaccggccacgtccgtacgacggtgatcgatccacaaggtgcggccgaaaccaacgactttggaccgggcgacgtgtggtattttcctcgcggtcatgggcacatgctggaatgcctgggcgataaaccggcgcatttcattctgatcttcgataacggctacttctcagagtttggcaccttctctattactgactggatcggtcacacaccgaaaccgcttctcgccaagaactttggtctgcccgaatcggcttttgatgggtttcccaaaaaagaggtctattttgcccgtggcgcggttccaccagccacccctgcagcgcctttacagggacgtgtattgccaccactcacgcataaatacgaactcctcgaacaagctcctcataaagttttcaaaggtggtcgtgaatggcgcgtggatagcacgcgttttcccatttccaagactgtaaccggcgttgttcttgatttggaacccggcgcgttacgcgagcttcactggcatcctaatgctgacgagtggcaatatgtgatcgatggcaacattagtgtgacgatgttcggttctcatggccgttaccgcaccgaacagatggagaagggtgatgtcgggtatattccacaggggtatggccacagcatcgaaaatgtgggagatcgtccttgtcgcgtcttgattggctttaacacaggtaactaccaagcgatcgacttatcacagtggattgcaggtaatcccgcggatgttcttgccacgaacttctccaaacccaccagcctctttgaaaagttcccaaaacaggacgtgtttattgctcctggcaagggccaaactggccaccatcaccatcaccat

SEQ ID NO: 194 - protein, 369 aa, synthetic construct
  REGION 1..369: note = Variant of oxalate decarboxylase from Gemmata sp. SH-PL17
MGDPTFMNNVPDHLLSDKDLPTFKFALEKSKGKVIGKSSGKEATVVQLPISKGIAGVSMTLEPGAMRELHWHATAAEWAFVLTGHVRTTVIDPQGAAETNDFGPGDVWYFPRGHGHMLECLGDKPAHFILIFDNGYFSEFGTFSITDWIGHTPKPLLAKNFGLPESAFDGFPKKEVYFARGAVPPATPAAPLQGRVLPPLTHKYELLEQAPHKVFKGGREWRVDSTRFPISKTVTGVVLDLEPGALRELHWHPNADEWQYVIDGNISVTMFGSHGRYRTEQMEKGDVGYIPQGYGHSIENVGDRPCRVLIGFNTGNYQAIDLSQWIAGNPADVLATNFSKPTSLFEKFPKQDVFIAPGKGQTGHHHHHH

SEQ ID NO: 195 - DNA, 1107 bp, synthetic construct
  misc_feature 1..1107: note = Variant of oxalate decarboxylase from Gemmata sp. SH-PL17
  source 1..1107: mol_type = other DNA
atgggtgatccgacctttatgaataatgtgccagaccatctgctgtcggataaagatttgccgacgttcaagtttgccctggaaaagagcaagggcaaagtcattgggaaaagttcgggaaaagaagcaaccgttgttcagttacctatctccaaaggcattgctggtgtgagcatgactcttgaaccgggtgcgatgcgcgaattgcactggcatgccacagcagcagagtgggctttcgtattaaccggccacgtccgtacgacggtgatcgatccacaaggtgcggccgaaaccaacgactttggaccgggcgacgtgtggtattttcctcgcggtcatgggcacatgctggaatgcctgggcgataaaccggcgcatttcattctgatcttcgataacggctacttctcagagtttggcaccttctctattactgactggatcggtcacacaccgaaagcgcttctcgccaagaactttggtctgcccgaatcggcttttgatgggtttcccaaagacgaggtctattttgcacgtggcgcggttccaccagccacccctgcagcgcctttacagggactgaagttgccaccactcacgcataaatacgaactcctcgaacaagctcctcataaagttttcaaaggtggtcgtgaatggcgcgtggatagctcgcgttttcccatttccaagactgtaaccggcgttgttcttgatttggaacccggcgcgttacgcgagcttcactggcatcctaatgctgacgagtggcaatatgtgatcgatggcaacattagtgtgacgatgttcggttctcatggccgttaccgcaccgaacagatggagaagggtgatgtcgggtatattccacaggggtatggccacagcatcgaaaatgtgggagatcgtccttgtcgcgtcttgattggctttaacacaggtaactaccaagcgatcgacttatcacagtggattgcaggtaatcccgcggatgttcttgccacgaacttctccaaacccaccagcctctttgaaaagttcccaaaacaggacgtgtttattgctcctggcaagggccaaactggccaccatcaccatcaccat

SEQ ID NO: 196 - protein, 369 aa, synthetic construct
  REGION 1..369: note = Variant of oxalate decarboxylase from Gemmata sp. SH-PL17
MGDPTFMNNVPDHLLSDKDLPTFKFALEKSKGKVIGKSSGKEATVVQLPISKGIAGVSMTLEPGAMRELHWHATAAEWAFVLTGHVRTTVIDPQGAAETNDFGPGDVWYFPRGHGHMLECLGDKPAHFILIFDNGYFSEFGTFSITDWIGHTPKALLAKNFGLPESAFDGFPKDEVYFARGAVPPATPAAPLQGLKLPPLTHKYELLEQAPHKVFKGGREWRVDSSRFPISKTVTGVVLDLEPGALRELHWHPNADEWQYVIDGNISVTMFGSHGRYRTEQMEKGDVGYIPQGYGHSIENVGDRPCRVLIGFNTGNYQAIDLSQWIAGNPADVLATNFSKPTSLFEKFPKQDVFIAPGKGQTGHHHHHH

SEQ ID NO: 197 - DNA, 1107 bp, synthetic construct
  misc_feature 1..1107: note = Variant of oxalate decarboxylase from Gemmata sp. SH-PL17
  source 1..1107: mol_type = other DNA
atgggtgatccgacctttatgaataatgtgccagacctgctgctggcggataaagatttgccgacgttcaagtttgccctggaaaagagcaagggcaaagtcattgggaaaagttcgggaaaagaagcaaccgttgttcagttacctatctccaaaggcattgctggtgtgagcatgactcttgaaccgggtgcgatgcgcgaattgcactggcatgccacagcagcagagtgggctttcgtattaaccggccacgtccgtacgacggtgatcgatccacaaggtgcggccgaaaccaacgactttggaccgggcgacgtgtggtattttcctcgcggtcatgggcacatgctggaatgcctgggcgataaaccggcgcatttcattctgatcttcgataacggctacttctcagagtttggcaccttctctattactgactggatcggtcacacaccgaaagcgcttctcgccaagaactttggtctgcccgaatcggcttttgatgggtttcccaaagacgaggtctattttgcacgtggcgcggttccaccagccacccctgcagcgcctttacagggacgcaaattgccaccactcacgcataaatacgaactcctcgaacaagctcctcataaagttttcaaaggtggtcgtgaatggcgcgtggatagcacccgttttcccatttccaagactgtaaccggcgttgttcttgatttggaacccggcgcgttacgcgagcttcactggcatcctaatgctgacgagtggcaatatgtgatcgatggcaacattagtgtgacgatgttcggttctcatggccgttaccgcaccgaacagatggagaaaggtgatgtcgggtatattccacaggggtatggccacagcatcgaaaatgtgggagatcgtccttgtcgcgtcttgattggctttaacacaggtaactaccaagcgatcgacttatcacagtggattgcaggtaatcccgcggatgttcttgccacgaacttctccaaacccaccagcctctttgaaaagttcccaaaacaggacgtgtttattgctcctggcaagggccaaactggccaccatcaccatcaccat

SEQ ID NO: 198 - protein, 369 aa, synthetic construct
  REGION 1..369: note = Variant of oxalate decarboxylase from Gemmata sp. SH-PL17
MGDPTFMNNVPDLLLADKDLPTFKFALEKSKGKVIGKSSGKEATVVQLPISKGIAGVSMTLEPGAMRELHWHATAAEWAFVLTGHVRTTVIDPQGAAETNDFGPGDVWYFPRGHGHMLECLGDKPAHFILIFDNGYFSEFGTFSITDWIGHTPKALLAKNFGLPESAFDGFPKDEVYFARGAVPPATPAAPLQGRKLPPLTHKYELLEQAPHKVFKGGREWRVDSTRFPISKTVTGVVLDLEPGALRELHWHPNADEWQYVIDGNISVTMFGSHGRYRTEQMEKGDVGYIPQGYGHSIENVGDRPCRVLIGFNTGNYQAIDLSQWIAGNPADVLATNFSKPTSLFEKFPKQDVFIAPGKGQTGHHHHHH

SEQ ID NO: 199 - DNA, 1107 bp, synthetic construct
  misc_feature 1..1107: note = Variant of oxalate decarboxylase from Gemmata sp. SH-PL17
  source 1..1107: mol_type = other DNA
atgggtgatccgacctttatgaataatgtgccagaccatctgctggcggataaagatttgccgacgttcaagtttgccctggaaaagagcaagggcaaagtcattgggaaaagttcgggaaaagaagcaaccgttgttcagttacctatctccaaaggcattgctggtgtgagcatgactcttgaaccgggtgcgatgcgcgaattgcactggcatgccacagcagcagagtgggctttcgtattaaccggccacgtccgtacgacggtgatcgatccacaaggtgcggccgaaaccaacgactttggaccgggcgacgtgtggtattttcctcgcggtcatgggcacatgctggaatgcctgggcgataaaccggcgcatttcattctgatcttcgataacggctacttctcagagtttggcaccttctctattactgactggatcggtcacacaccgaaagcgcttctcgccaagaactttggtctgcccgaatcggcttttgatgggtttcccaaagacgaggtctattttgcacgtggcgcggttccaccagccacccctgcagcgcctttacagggacgcaaattgccaccactcacgcataaatacgaactcctcgaacaagctcctcataaagttttcaaaggtggtcgtgaatggcgcgtggatagcacccgttttcccatttccaagactgtaaccggcgttgttcttgatttggaacccggcgcgttacgcgagcttcactggcatcctaatgctgacgagtggcaatatgtgatcgatggcaacattagtgtgacgatgttcggttctcatggccgttaccgcaccgaacagatggagaaaggtgatgtcgggtatattccacaggggtatggccacagcatcgaaaatgtgggagatcgtccttgtcgcgtcttgattggctttaacacaggtaactacgaggcgatcgacttatcacagtggattgcaggtaatcccgcggatgttcttgccacgaacttctccaaacccaccagcctctttgaaaagttcccaaaacaggacgtgtttattgctcctggcaagggccaaactggccaccatcaccatcaccat

SEQ ID NO: 200 - protein, 369 aa, synthetic construct; identical to SEQ ID NO: 174
  REGION 1..369: note = Variant of oxalate decarboxylase from Gemmata sp. SH-PL17

SEQ ID NO: 201 - DNA, 1107 bp, synthetic construct
  misc_feature 1..1107: note = Variant of oxalate decarboxylase from Gemmata sp. SH-PL17
  source 1..1107: mol_type = other DNA
atgggtgatccgacctttatgaataatgtgccagaccatctgctgtcggataaagatttgccgacgttcaagtttgcactggaaaagagcaagggcaaagtcattgggaaaagttcgggaaaagaagcaaccgttgttcagttacctatctccaaaggcattgctggtgtgagcatgactcttgaaccgggtgcgatgcgcgaattgcactggcatgccacagcagcagagtgggctttcgtattaaccggccacgtccgtacgacggtgatcgatccacaaggtgcggccgaaaccaacgactttggaccgggcgacgtgtggtattttcctcgcggtcatgggcacatgctggaatgcctgggcgataaaccggcgcatttcattctgatcttcgataacggctacttctcagagtttggcaccttctctattactgactggatcggtcacacaccgaaagcgcttctcgccaagaactttggtctgcccgaatcggcttttgatgggtttcccaaagatgaggtctattttgcacgtggcgcggttccaccagccacccctgcagcgcctttacagggactggtattgccaccactcacgcataaatacgaactcctcgaacaagaacctcataaagttttcaaaggtggtcgtgaatggcgcgtggatagcacgcgttttcccatttccaagactgtaaccggcgttgttcttgatttggaacccggcgcgttacgcgagcttcactggcatcctaatgctgacgagtggcaatatgtgatcgatggcaacattagtgtgacgatgttcggttctcatggccgttaccgcaccgaacagatggagaagggtgatgtcgggtatattccacaggggtatggccacagcatcgaaaatgtgggagatcgtccttgtcgcgtcttgattggctttaacacaggtaactaccaagcgatcgacttatcacagtggattgcaggtaatcccgcggatgttcttgccacgaacttctccaaacccaccagcctctttgaaaagttcccaaaacaggacgtgtttattgctcctggcaagggccaaactggccaccatcaccatcaccat

SEQ ID NO: 202 - protein, 369 aa, synthetic construct
  REGION 1..369: note = Variant of oxalate decarboxylase from Gemmata sp. SH-PL17
MGDPTFMNNVPDHLLSDKDLPTFKFALEKSKGKVIGKSSGKEATVVQLPISKGIAGVSMTLEPGAMRELHWHATAAEWAFVLTGHVRTTVIDPQGAAETNDFGPGDVWYFPRGHGHMLECLGDKPAHFILIFDNGYFSEFGTFSITDWIGHTPKALLAKNFGLPESAFDGFPKDEVYFARGAVPPATPAAPLQGLVLPPLTHKYELLEQEPHKVFKGGREWRVDSTRFPISKTVTGVVLDLEPGALRELHWHPNADEWQYVIDGNISVTMFGSHGRYRTEQMEKGDVGYIPQGYGHSIENVGDRPCRVLIGFNTGNYQAIDLSQWIAGNPADVLATNFSKPTSLFEKFPKQDVFIAPGKGQTGHHHHHH

SEQ ID NO: 203 - DNA, 1107 bp, synthetic construct
  misc_feature 1..1107: note = Variant of oxalate decarboxylase from Gemmata sp. SH-PL17
  source 1..1107: mol_type = other DNA
atgggtgatccgacctttatgaataatgtgccagaccatctgctgtcggataaagatttgccgacgttcaagtttgaactggaaaagagcaagggcaaagtcattgggaaaagttcgggaaaagaagcaaccgttgttcagttacctatctccaaaggcattgctggtgtgagcatgactcttgaaccgggtgcgatgcgcgaattgcactggcatgccacagcagcagagtgggctttcgtattaaccggccacgtccgtacgacggtgatcgatccacaaggtgcggccgaaaccaacgactttggaccgggcgacgtgtggtattttcctcgcggtcatgggcacatgctggaatgcctgggcgatgcaccggcgcatttcattctgatcttcgataacggctacttctcagagtttggcaccttctctattactgactggatcggtcacacaccgaaaccgcttctcgccaagaactttggtctgcccgaatcggcttttgatgggtttcccaaaaaagaggtctattttgcacgtggcgcggttccaccagccacccctgcagcgcctttacagggacgtgtattgccaccactcacgcataaatacgaactcctcgaacaagaacctcataaagttttcaaaggtggtcgtgaatggcgcgtggatagcacccgttttcccatttccaagactgtaaccggcgttgttcttgatttggaacccggcgcgttacgcgagcttcactggcatcctaatgctgacgagtggcaatatgtgatcgatggcaacattagtgtgacgatgttcggttctcatggccgttaccgcaccgaacagatggagaagggtgatgtcgggtatattccacaggggtatggccacagcatcgaaaatgtgggagatcgtccttgtcgcgtcttgattggctttaacacaggtaactaccaagcgatcgacttatcacagtggattgcaggtaatcccgcggatgttcttgccacgaacttctccaaacccaccagcctctttgaaaagttcccaaaacaggacgtgtttattgctcctggcaagggccaaactggccaccatcaccatcaccat

SEQ ID NO: 204 - protein, 369 aa, synthetic construct
  REGION 1..369: note = Variant of oxalate decarboxylase from Gemmata sp. SH-PL17
MGDPTFMNNVPDHLLSDKDLPTFKFELEKSKGKVIGKSSGKEATVVQLPISKGIAGVSMTLEPGAMRELHWHATAAEWAFVLTGHVRTTVIDPQGAAETNDFGPGDVWYFPRGHGHMLECLGDAPAHFILIFDNGYFSEFGTFSITDWIGHTPKPLLAKNFGLPESAFDGFPKKEVYFARGAVPPATPAAPLQGRVLPPLTHKYELLEQEPHKVFKGGREWRVDSTRFPISKTVTGVVLDLEPGALRELHWHPNADEWQYVIDGNISVTMFGSHGRYRTEQMEKGDVGYIPQGYGHSIENVGDRPCRVLIGFNTGNYQAIDLSQWIAGNPADVLATNFSKPTSLFEKFPKQDVFIAPGKGQTGHHHHHH

SEQ ID NO: 205 - DNA, 1107 bp, synthetic construct
  misc_feature 1..1107: note = Variant of oxalate decarboxylase from Gemmata sp. SH-PL17
  source 1..1107: mol_type = other DNA
atgggtgatccgacctttatgaataatgtgccagaccatctgctggcggataaagatttgccgacgttcaagtttgcactggaaaagagcaagggcaaagtcattgggaaaagttcgggaaaagaagcaaccgttgttcagttacctatctccaaaggcattgctggtgtgagcatgactcttgaaccgggtgcgatgcgcgaattgcactggcatgccacagcagcagagtgggctttcgtattaaccggccacgtccgtacgacggtgatcgatccacaaggtgcggccgaaaccaacgactttggaccgggcgacgtgtggtattttcctcgcggtcatgggcacatgctggaatgcctgggcgataaaccggcgcatttcattctgatcttcgataacggctacttctcagagtttggcaccttctctattactgactggatcggtcacacaccgaaagcgcttctcgccaagaactttggtctgcccgaatcggcttttgatgggtttcccaaagacgaggtctattttgcacgtggcgcggttccaccagccacccctgcagcgcctttacagggactgaagttgccaccactcacgcataaatacgaactcctcgaacaagaacctcataaagttttcaaaggtggtcgtgaatggcgcgtggatagcacgcgttttcccatttccaagactgtaaccggcgttgttcttgatttggaacccggcgcgttacgcgagcttcactggcatcctaatgctgacgagtggcaatatgtgatcgatggcaacattagtgtgacgatgttcggttctcatggccgttaccgcaccgaacagatggagaagggtgatgtcgggtatattccacaggggtatggccacagcatcgaaaatgtgggagatcgtccttgtcgcgtcttgattggctttaacacaggtaactaccaagcgatcgacttatcacagtggattgcaggtaatcccgcggatgttcttgccacgaacttctccaaacccaccagcctctttgaaaagttcccaaaacaggacgtgtttattgctcctggcaagggccaaactggccaccatcaccatcaccat

SEQ ID NO: 206 - protein, 369 aa, synthetic construct
  REGION 1..369: note = Variant of oxalate decarboxylase from Gemmata sp. SH-PL17
MGDPTFMNNVPDHLLADKDLPTFKFALEKSKGKVIGKSSGKEATVVQLPISKGIAGVSMTLEPGAMRELHWHATAAEWAFVLTGHVRTTVIDPQGAAETNDFGPGDVWYFPRGHGHMLECLGDKPAHFILIFDNGYFSEFGTFSITDWIGHTPKALLAKNFGLPESAFDGFPKDEVYFARGAVPPATPAAPLQGLKLPPLTHKYELLEQEPHKVFKGGREWRVDSTRFPISKTVTGVVLDLEPGALRELHWHPNADEWQYVIDGNISVTMFGSHGRYRTEQMEKGDVGYIPQGYGHSIENVGDRPCRVLIGFNTGNYQAIDLSQWIAGNPADVLATNFSKPTSLFEKFPKQDVFIAPGKGQTGHHHHHH

SEQ ID NO: 207 - DNA, 1107 bp, synthetic construct
  misc_feature 1..1107: note = Variant of oxalate decarboxylase from Gemmata sp. SH-PL17
  source 1..1107: mol_type = other DNA
atgggtgatccgacctttatgaataatgtgccagaccatctgctggcggataaagatttgccgacgttcaagtttgaactggaaaagagcaagggcaaagtcattgggaaaagttcgggaaaagaagcaaccgttgttcagttacctatctccaaaggcattgctggtgtgagcatgactcttgaaccgggtgcgatgcgcgaattgcactggcatgccacagcagcagagtgggctttcgtattaaccggccacgtccgtacgacggtgatcgatccacaaggtgcggccgaaaccaacgactttggaccgggcgacgtgtggtattttcctcgcggtcatgggcacatgctggaatgcctgggcgataaaccggcgcatttcattctgatcttcgataacggctacttctcagagtttggcaccttctctattactgactggatcggtcacacaccgaaaccgcttctcgccaagaactttggtctgcccgaatcggcttttgatgggtttcccaaaaaagaggtctattttgcacgtggcgcggttccaccagccacccctgcagcgcctttacagggacgtaagttgccaccactcacgcataaatacgaactcctcgaacaagaacctcataaagttttcaaaggtggtcgtgaatggcgcgtggatagcacgcgttttcccatttccaagactgtaaccggcgttgttcttgatttggaacccggcgcgttacgcgagcttcactggcatcctaatgctgacgagtggcaatatgtgatcgatggcaacattagtgtgacgatgttcggttctcatggccgttaccgcaccgaacagatggagaagggtgatgtcgggtatattccacaggggtatggccacagcatcgaaaatgtgggagatcgtccttgtcgcgtcttgattggctttaacacaggtaactaccaagcgatcgacttatcacagtggattgcaggtaatcccgcggatgttcttgccacgaacttctccaaacccaccagcctctttgaaaagttcccaaaacaggacgtgtttattgctcctggcaagggccaaactggccaccatcaccatcaccat

SEQ ID NO: 208 - protein, 369 aa, synthetic construct
  REGION 1..369: note = Variant of oxalate decarboxylase from Gemmata sp. SH-PL17
MGDPTFMNNVPDHLLADKDLPTFKFELEKSKGKVIGKSSGKEATVVQLPISKGIAGVSMTLEPGAMRELHWHATAAEWAFVLTGHVRTTVIDPQGAAETNDFGPGDVWYFPRGHGHMLECLGDKPAHFILIFDNGYFSEFGTFSITDWIGHTPKPLLAKNFGLPESAFDGFPKKEVYFARGAVPPATPAAPLQGRKLPPLTHKYELLEQEPHKVFKGGREWRVDSTRFPISKTVTGVVLDLEPGALRELHWHPNADEWQYVIDGNISVTMFGSHGRYRTEQMEKGDVGYIPQGYGHSIENVGDRPCRVLIGFNTGNYQAIDLSQWIAGNPADVLATNFSKPTSLFEKFPKQDVFIAPGKGQTGHHHHHH

SEQ ID NO: 209 - DNA, 1107 bp, synthetic construct
  misc_feature 1..1107: note = Variant of oxalate decarboxylase from Gemmata sp. SH-PL17
  source 1..1107: mol_type = other DNA
atgggtgatccgacctttatgaataatgtgccagaccatctgctggcggataaagatttgccgacgttcaagtttgccctggaaaagagcaagggcaaagtcattgggaaaagttcgggaaaagaagcaaccgttgttcagttacctatctccaaaggcattgctggtgtgagcatgactcttgaaccgggtgcgatgcgcgaattgcactggcatgccacagcagcagagtgggctttcgtattaaccggccacgtccgtacgacggtgatcgatccacaaggtgcggccgaaaccaacgactttggaccgggcgacgtgtggtattttcctcgcggtcatgggcacatgctggaatgcctgggcgataaaccggcgcatttcattctgatcttcgataacggctacttctcagagtttggcaccttctctattactgactggatcggtcacacaccgaaagcgcttctcgccaagaactttggtctgcccgaatcggcttttgatgggtttcccaaagacgaggtctattttgcacgtggcgcggttccaccagccacccctgcagcgcctttacagggacgcaaattgccaccactcacgcataaatacgaactcctcgaacaagctcctcataaagttttcaaaggtggtcgtgaatggcgcgtggatagcacccgttttcccatttccaagactgtaaccggcgttgttcttgatttggaacccggcgcgttacgcgagcttcactggcatcctaatgctgacgagtggcaatatgtgatcgatggcaacattagtgtgacgatgttcggttctcatggccgttaccgcaccgaacagatggagaaaggtgatgtcgggtatattccacaggggtatggccacagcatcgaaaatgtgggagatcgtccttgtcgcgtcttgattggctttaacacaggtgtgtaccaagcgatcgacttatcacagtggattgcaggtaatcccgcggatgttcttgccacgaacttctccaaacccaccagcctctttgaaaagttcccaaaacaggacgtgtttattgctcctggcaagggccaaactggccaccatcaccatcaccat

SEQ ID NO: 210 - protein, 369 aa, synthetic construct
  REGION 1..369: note = Variant of oxalate decarboxylase from Gemmata sp. SH-PL17
MGDPTFMNNVPDHLLADKDLPTFKFALEKSKGKVIGKSSGKEATVVQLPISKGIAGVSMTLEPGAMRELHWHATAAEWAFVLTGHVRTTVIDPQGAAETNDFGPGDVWYFPRGHGHMLECLGDKPAHFILIFDNGYFSEFGTFSITDWIGHTPKALLAKNFGLPESAFDGFPKDEVYFARGAVPPATPAAPLQGRKLPPLTHKYELLEQAPHKVFKGGREWRVDSTRFPISKTVTGVVLDLEPGALRELHWHPNADEWQYVIDGNISVTMFGSHGRYRTEQMEKGDVGYIPQGYGHSIENVGDRPCRVLIGFNTGVYQAIDLSQWIAGNPADVLATNFSKPTSLFEKFPKQDVFIAPGKGQTGHHHHHH

SEQ ID NO: 211 - DNA, 1107 bp, synthetic construct
  misc_feature 1..1107: note = Variant of oxalate decarboxylase from Gemmata sp. SH-PL17
  source 1..1107: mol_type = other DNA
atgggtgatccgacctttatgaataatgtgccagaccatctgctggcggataaagatttgccgacgttcaagtttgccctggaaaagagcaagggcaaagtcattgggaaaagttcgggaaaagaagcaaccgttgttcagttacctatctccaaaggcattgctggtgtgagcatggtgcttgaaccgggtgcgatgcgcgaattgcactggcatgccacagcagcagagtgggctttcgtattaaccggccacgtccgtacgacggtgatcgatccacaaggtgcggccgaaaccaacgactttggaccgggcgacgtgtggtattttcctcgcggtcatgggcacatgctggaatgcctgggcgataaaccggcgcatttcattctgatcttcgataacggctacttctcagagtttggcaccttctctattactgactggatcggtcacacaccgaaagcgcttctcgccaagaactttggtctgcccgaatcggcttttgatgggtttcccaaagacgaggtctattttgcacgtggcgcggttccaccagccacccctgcagcgcctttacagggacgcaaattgccaccactcacgcataaatacgaactcctcgaacaagctcctcataaagttttcaaaggtggtcgtgaatggcgcgtggatagcacccgttttcccatttccaagactgtaaccggcgttgttcttgatttggaacccggcgcgttacgcgagcttcactggcatcctaatgctgacgagtggcaatatgtgatcgatggcaacattagtgtgacgatgttcggttctcatggccgttaccgcaccgaacagatggagaaaggtgatgtcgggtatattccacaggggtatggccacagcatcgaaaatgtgggagatcgtccttgtcgcgtcttgattggctttaacacaggtaactaccaagcgatcgacttatcacagtggattgcaggtaatcccgcggatgttcttgccacgaacttctccaaacccaccagcctctttgaaaagttcccaaaacaggacgtgtttattgctcctggcaagggccaaactggccaccatcaccatcaccat

SEQ ID NO: 212 - protein, 369 aa, synthetic construct
  REGION 1..369: note = Variant of oxalate decarboxylase from Gemmata sp. SH-PL17
MGDPTFMNNVPDHLLADKDLPTFKFALEKSKGKVIGKSSGKEATVVQLPISKGIAGVSMVLEPGAMRELHWHATAAEWAFVLTGHVRTTVIDPQGAAETNDFGPGDVWYFPRGHGHMLECLGDKPAHFILIFDNGYFSEFGTFSITDWIGHTPKALLAKNFGLPESAFDGFPKDEVYFARGAVPPATPAAPLQGRKLPPLTHKYELLEQAPHKVFKGGREWRVDSTRFPISKTVTGVVLDLEPGALRELHWHPNADEWQYVIDGNISVTMFGSHGRYRTEQMEKGDVGYIPQGYGHSIENVGDRPCRVLIGFNTGNYQAIDLSQWIAGNPADVLATNFSKPTSLFEKFPKQDVFIAPGKGQTGHHHHHH

SEQ ID NO: 213 - DNA, 1107 bp, synthetic construct
  misc_feature 1..1107: note = Variant of oxalate decarboxylase from Gemmata sp. SH-PL17
  source 1..1107: mol_type = other DNA
atgggtgatccgacctttatgaataatgtgccagaccatctgctgtcggataaagatttgccgacgttcaagtttgccctggaaaagagcaagggcaaagtcattgggaaaagttcgggaaaagaagcaaccgttgttcagttacctatctccaaaggcattgctggtgtgagcatgactcttgaaccgggtgcgatgcgcgaattgcactggcatgccacagcagcagagtgggctttcgtattaaccggccacgtccgtacgacggtgatcgatccacaaggtgcggccgaaaccaacgactttggaccgggcgacgtgtggtattttcctcgcggtcatgggcacatgctggaatgcctgggcgataaaccggcgcatttcattctgatcttcgataacggctacttctcagagtttggcaccttctctattactgactggatcggtcacacaccgaaaccgcttctcgccaagaactttggtctgcccgaatcggcttttgatgggtttcccaaaaaagaggtctattttgcacgtggcgcggttccaccagccacccctgcagcgcctttacagggacgtaagttgccaccactcacgcataaatacgaactcctcgaacaagctcctcataaagttttcaaaggtggtcgtgaatggcgcgtggatagcacccgttttcccatttccaagactgtaaccggcgttgttcttgatttggaacccggcgcgttacgcgagcttcactggcatcctaatgctgacgagtggcaatatgtgatcgatggcaacattagtgtgacgatgttcggttctcatggccgttaccgcaccgaacagatggagaagggtgatgtcgggtatattccacaggggtatggccacagcatcgaaaatgtgggagatcgtccttgtcgcgtcttgattggctttaacacaggtaactaccaagcgatcgacttatcacagtggattgcaggtaatcccgcggatgttcttgccacgaacttctccaaacccaccagcctctttgaaaagttcccaaaacaggacgtgtttattgctcctggcaagggccaaactggccaccatcaccatcaccat

SEQ ID NO: 214 - protein, 369 aa, synthetic construct
  REGION 1..369: note = Variant of oxalate decarboxylase from Gemmata sp. SH-PL17
MGDPTFMNNVPDHLLSDKDLPTFKFALEKSKGKVIGKSSGKEATVVQLPISKGIAGVSMTLEPGAMRELHWHATAAEWAFVLTGHVRTTVIDPQGAAETNDFGPGDVWYFPRGHGHMLECLGDKPAHFILIFDNGYFSEFGTFSITDWIGHTPKPLLAKNFGLPESAFDGFPKKEVYFARGAVPPATPAAPLQGRKLPPLTHKYELLEQAPHKVFKGGREWRVDSTRFPISKTVTGVVLDLEPGALRELHWHPNADEWQYVIDGNISVTMFGSHGRYRTEQMEKGDVGYIPQGYGHSIENVGDRPCRVLIGFNTGNYQAIDLSQWIAGNPADVLATNFSKPTSLFEKFPKQDVFIAPGKGQTGHHHHHH

SEQ ID NO: 215 - DNA, 1107 bp, synthetic construct
  misc_feature 1..1107: note = Variant of oxalate decarboxylase from Gemmata sp. SH-PL17
  source 1..1107: mol_type = other DNA
atgggtgatccgacctttatgaataatgtgccagaccatctgctgtcggataaagatttgccgacgttcaagtttgcactggaaaagagcaagggcaaagtcattgggaaaagttcgggaaaagaagcaaccgttgttcagttacctatctccaaaggcattgctggtgtgagcatgactcttgaaccgggtgcgatgcgcgaattgcactggcatgccacagcagcagagtgggctttcgtattaaccggccacgtccgtacgacggtgatcgatccacaaggtgcggccgaaaccaacgactttggaccgggcgacgtgtggtattttcctcgcggtcatgggcacatgctggaatgcctgggcgatgcaccggcgcatttcattctgatcttcgataacggctacttctcagagtttggcaccttctctattactgactggatcggtcacacaccgaaagcgcttctcgccaagaactttggtctgcccgaatcggcttttgatgggtttcccaaaaaagaggtctattttgcacgtggcgcggttccaccagccacccctgcagcgcctttacagggacgtgtattgccaccactcacgcataaatacgaactcctcgaacaagctcctcataaagttttcaaaggtggtcgtgaatggcgcgtggatagcacgcgttttcccatttccaagactgtaaccggcgttgttcttgatttggaacccggcgcgttacgcgagcttcactggcatcctaatgctgacgagtggcaatatgtgatcgatggcaacattagtgtgacgatgttcggttctcatggccgttaccgcaccgaacagatggagaagggtgatgtcgggtatattccacaggggtatggccacagcatcgaaaatgtgggagatcgtccttgtcgcgtcttgattggctttaacacaggtaactaccaagcgatcgacttatcacagtggattgcaggtaatcccgcggatgttcttgccacgaacttctccaaacccaccagcctctttgaaaagttcccaaaacaggacgtgtttattgctcctggcaagggccaaactggccaccatcaccatcaccat

SEQ ID NO: 216 - protein, 369 aa, synthetic construct
  REGION 1..369: note = Variant of oxalate decarboxylase from Gemmata sp. SH-PL17
MGDPTFMNNVPDHLLSDKDLPTFKFALEKSKGKVIGKSSGKEATVVQLPISKGIAGVSMTLEPGAMRELHWHATAAEWAFVLTGHVRTTVIDPQGAAETNDFGPGDVWYFPRGHGHMLECLGDAPAHFILIFDNGYFSEFGTFSITDWIGHTPKALLAKNFGLPESAFDGFPKKEVYFARGAVPPATPAAPLQGRVLPPLTHKYELLEQAPHKVFKGGREWRVDSTRFPISKTVTGVVLDLEPGALRELHWHPNADEWQYVIDGNISVTMFGSHGRYRTEQMEKGDVGYIPQGYGHSIENVGDRPCRVLIGFNTGNYQAIDLSQWIAGNPADVLATNFSKPTSLFEKFPKQDVFIAPGKGQTGHHHHHH

SEQ ID NO: 217 - DNA, 1107 bp, synthetic construct
  misc_feature 1..1107: note = Variant of oxalate decarboxylase from Gemmata sp. SH-PL17
  source 1..1107: mol_type = other DNA
atgggtgatccgacctttatgaataatgtgccagaccatctgctgtcggataaagatttgccgacgttcaagtttgcactggaaaagagcaagggcaaagtcattgggaaaagttcgggaaaagaagcaaccgttgttcagttacctatctccaaaggcattgctggtgtgagcatgactcttgaaccgggtgcgatgcgcgaattgcactggcatgccacagcagcagagtgggctttcgtattaaccggccacgtccgtacgacggtgatcgatccacaaggtgcggccgaaaccaacgactttggaccgggcgacgtgtggtattttcctcgcggtcatgggcacatgctggaatgcctgggcgataaaccggcgcatttcattctgatcttcgataacggctacttctcagagtttggcaccttctctattactgactggatcggtcacacaccgaaagcgcttctcgccaagaactttggtctgcccgaatcggcttttgatgggtttcccaaagatgaggtctattttgcacgtggcgcggttccaccagccacccctgcagcgcctttacagggacgcaaattgccaccactcacgcataaatacgaactcctcgaacaagctcctcataaagttttcaaaggtggtcgtgaatggcgcgtggatagctcgcgttttcccatttccaagactgtaaccggcgttgttcttgatttggaacccggcgcgttacgcgagcttcactggcatcctaatgctgacgagtggcaatatgtgatcgatggcaacattagtgtgacgatgttcggttctcatggccgttaccgcaccgaacagatggagaagggtgatgtcgggtatattccacaggggtatggccacagcatcgaaaatgtgggagatcgtccttgtcgcgtcttgattggctttaacacaggtaactaccaagcgatcgacttatcacagtggattgcaggtaatcccgcggatgttcttgccacgaacttctccaaacccaccagcctctttgaaaagttcccaaaacaggacgtgtttattgctcctggcaagggccaaactggccaccatcaccatcaccat

SEQ ID NO: 218 - protein, 369 aa, synthetic construct
  REGION 1..369: note = Variant of oxalate decarboxylase from Gemmata sp. SH-PL17
MGDPTFMNNVPDHLLSDKDLPTFKFALEKSKGKVIGKSSGKEATVVQLPISKGIAGVSMTLEPGAMRELHWHATAAEWAFVLTGHVRTTVIDPQGAAETNDFGPGDVWYFPRGHGHMLECLGDKPAHFILIFDNGYFSEFGTFSITDWIGHTPKALLAKNFGLPESAFDGFPKDEVYFARGAVPPATPAAPLQGRKLPPLTHKYELLEQAPHKVFKGGREWRVDSSRFPISKTVTGVVLDLEPGALRELHWHPNADEWQYVIDGNISVTMFGSHGRYRTEQMEKGDVGYIPQGYGHSIENVGDRPCRVLIGFNTGNYQAIDLSQWIAGNPADVLATNFSKPTSLFEKFPKQDVFIAPGKGQTGHHHHHH

SEQ ID NO: 219 - DNA, 1107 bp, synthetic construct
  misc_feature 1..1107: note = Variant of oxalate decarboxylase from Gemmata sp. SH-PL17
  source 1..1107: mol_type = other DNA
atgggtgatccgacctttatgaataatgtgccagaccatctgctgtcggataaagatttgccgacgttcaagtttgaactggaaaagagcaagggcaaagtcattgggaaaagttcgggaaaagaagcaaccgttgttcagttacctatctccaaaggcattgctggtgtgagcatgactcttgaaccgggtgcgatgcgcgaattgcactggcatgccacagcagcagagtgggctttcgtattaaccggccacgtccgtacgacggtgatcgatccacaaggtgcggccgaaaccaacgactttggaccgggcgacgtgtggtattttcctcgcggtcatgggcacatgctggaatgcctgggcgataaaccggcgcatttcattctgatcttcgataacggctacttctcagagtttggcaccttctctattactgactggatcggtcacacaccgaaagcgcttctcgccaagaactttggtctgcccgaatcggcttttgatgggtttcccaaaaaagaggtctattttgcacgtggcgcggttccaccagccacccctgcagcgcctttacagggacgtgtattgccaccactcacgcataaatacgaactcctcgaacaagctcctcataaagttttcaaaggtggtcgtgaatggcgcgtggatagctcgcgttttcccatttccaagactgtaaccggcgttgttcttgatttggaacccggcgcgttacgcgagcttcactggcatcctaatgctgacgagtggcaatatgtgatcgatggcaacattagtgtgacgatgttcggttctcatggccgttaccgcaccgaacagatggagaagggtgatgtcgggtatattccacaggggtatggccacagcatcgaaaatgtgggagatcgtccttgtcgcgtcttgattggctttaacacaggtaactaccaagcgatcgacttatcacagtggattgcaggtaatcccgcggatgttcttgccacgaacttctccaaacccaccagcctctttgaaaagttcccaaaacaggacgtgtttattgctcctggcaagggccaaactggccaccatcaccatcaccat

SEQ ID NO: 220 - protein, 369 aa, synthetic construct
  REGION 1..369: note = Variant of oxalate decarboxylase from Gemmata sp. SH-PL17
MGDPTFMNNVPDHLLSDKDLPTFKFELEKSKGKVIGKSSGKEATVVQLPISKGIAGVSMTLEPGAMRELHWHATAAEWAFVLTGHVRTTVIDPQGAAETNDFGPGDVWYFPRGHGHMLECLGDKPAHFILIFDNGYFSEFGTFSITDWIGHTPKALLAKNFGLPESAFDGFPKKEVYFARGAVPPATPAAPLQGRVLPPLTHKYELLEQAPHKVFKGGREWRVDSSRFPISKTVTGVVLDLEPGALRELHWHPNADEWQYVIDGNISVTMFGSHGRYRTEQMEKGDVGYIPQGYGHSIENVGDRPCRVLIGFNTGNYQAIDLSQWIAGNPADVLATNFSKPTSLFEKFPKQDVFIAPGKGQTGHHHHHH

SEQ ID NO: 221 - DNA, 1107 bp, synthetic construct
  misc_feature 1..1107: note = Variant of oxalate decarboxylase from Gemmata sp. SH-PL17
  source 1..1107: mol_type = other DNA
atgggtgatccgacctttatgaataatgtgccagaccatctgctggcgcataaagatttgccgacgttcaagtttgccctggaaaagagcaagggcaaagtcattgggaaaagttcgggaaaagaagcaaccgttgttcagttacctatctccaaaggcattgctggtgtgagcatgactcttgaaccgggtgcgatgcgcgaattgcactggcatgccacagcagcagagtgggctttcgtattaaccggccacgtccgtacgacggtgatcgatccacaaggtgcggccgaaaccaacgactttggaccgggcgacgtgtggtattttcctcgcggtcatgggcacatgctggaatgcctgggcgataaaccggcgcatttcattctgatcttcgataacggctacttctcagagtttggcaccttctctattactgactggatcggtcacacaccgaaagcgcttctcgccaagaactttggtctgcccgaatcggcttttgatgggtttcccaaagacgaggtctattttgcacgtggcgcggttccaccagccacccctgcagcgcctttacagggacgcaaattgccaccactcacgcataaatacgaactcctcgaacaagctcctcataaagttttcaaaggtggtcgtgaatggcgcgtggatagcacccgttttcccatttccaagactgtaaccggcgttgttcttgatttggaacccggcgcgttacgcgagcttcactggcatcctaatgctgacgagtggcaatatgtgatcgatggcaacattagtgtgacgatgttcggttctcatggccgttaccgcaccgaacagatggagaaaggtgatgtcgggtatattccacaggggtatggccacagcatcgaaaatgtgggagatcgtccttgtcgcgtcttgattggctttaacacaggtaactaccaagcgatcgacttatcacagtggattgcaggtaatcccgcggatgttcttgccacgaacttctccaaacccaccagcctctttgaaaagttcccaaaacaggacgtgtttattgctcctggcaagggccaaactggccaccatcaccatcaccat

SEQ ID NO: 222 - protein, 369 aa, synthetic construct
  REGION 1..369: note = Variant of oxalate decarboxylase from Gemmata sp. SH-PL17
MGDPTFMNNVPDHLLAHKDLPTFKFALEKSKGKVIGKSSGKEATVVQLPISKGIAGVSMTLEPGAMRELHWHATAAEWAFVLTGHVRTTVIDPQGAAETNDFGPGDVWYFPRGHGHMLECLGDKPAHFILIFDNGYFSEFGTFSITDWIGHTPKALLAKNFGLPESAFDGFPKDEVYFARGAVPPATPAAPLQGRKLPPLTHKYELLEQAPHKVFKGGREWRVDSTRFPISKTVTGVVLDLEPGALRELHWHPNADEWQYVIDGNISVTMFGSHGRYRTEQMEKGDVGYIPQGYGHSIENVGDRPCRVLIGFNTGNYQAIDLSQWIAGNPADVLATNFSKPTSLFEKFPKQDVFIAPGKGQTGHHHHHH

SEQ ID NO: 223 - DNA, 1107 bp, synthetic construct
  misc_feature 1..1107: note = Variant of oxalate decarboxylase from Gemmata sp. SH-PL17
  source 1..1107: mol_type = other DNA
atgggtgatccgacctttatgaataatgtgccagaccatctgctggcggataaagatttgccgacgttcaagtttgccctggaaaagagcaagggcaaagtcattgggaaaagttcgggaaaagaagcaaccgttgttcagttacctatctccaaaggcattgctggtgtgagcatgactcttgaaccgggtgcgatgcgcgaattgcactggcatgccacagcagcagagtgggctttcgtattaaccggccacgtccgtacgacggtgatcgatccacaaggtgcggccgaaaccaacgactttggaccgggcgacgtgtggtattttcctcgcggtcatgggcacatgctggaatgcctgggcgataaaccggcgcatttcattctgatcttcgataacggctacttctcagagtttggcaccttctctattactgactggatcggtcacacaccgaaagcgcttctcgccaagaactttggtctgcccgaatcggcttttgatgggtttcccaaagacgaggtctattttgcacgtggcgcggttccaccagccacccctgcagcgcctttacagggacgcaaattgccaccactcacgcataaatacgaactcctcgaacaagctcctcataaagttttcaaaggtggtcgtgaatggcgcgtggatagcacccgttttcccatttccaagactgtaaccggcgttgttcttgatttggaacccggcgcgttacgcgagcttcactggcatcctaatgctgacgagtggcaatatgtgatcgatggcaacattagtgtgacgatgttcggttctcatggccgttaccgcaccgaacagatggagaaaggtgatgtcgggtatattccacaggggtatggccacagcatcgaaaatgtgggagatcgtccttgtcgcgtcttgattggctttaacacaggtaactaccaagcgatcgacttatcacagtggattgcaggtaatcccgtggatgttcttgccacgaacttctccaaacccaccagcctctttgaaaagttcccaaaacaggacgtgtttattgctcctggcaagggccaaactggccaccatcaccatcaccat

SEQ ID NO: 224 - protein, 369 aa, synthetic construct
  REGION 1..369: note = Variant of oxalate decarboxylase from Gemmata sp. SH-PL17
MGDPTFMNNVPDHLLADKDLPTFKFALEKSKGKVIGKSSGKEATVVQLPISKGIAGVSMTLEPGAMRELHWHATAAEWAFVLTGHVRTTVIDPQGAAETNDFGPGDVWYFPRGHGHMLECLGDKPAHFILIFDNGYFSEFGTFSITDWIGHTPKALLAKNFGLPESAFDGFPKDEVYFARGAVPPATPAAPLQGRKLPPLTHKYELLEQAPHKVFKGGREWRVDSTRFPISKTVTGVVLDLEPGALRELHWHPNADEWQYVIDGNISVTMFGSHGRYRTEQMEKGDVGYIPQGYGHSIENVGDRPCRVLIGFNTGNYQAIDLSQWIAGNPVDVLATNFSKPTSLFEKFPKQDVFIAPGKGQTGHHHHHH

SEQ ID NO: 225 - DNA, 1107 bp, synthetic construct
  misc_feature 1..1107: note = Variant of oxalate decarboxylase from Gemmata sp. SH-PL17
  source 1..1107: mol_type = other DNA
atgggtgatccgacctttatgaataatgtgccagaccatctgctggcggataaagatttgccgacgttcaagtttgccctggaaaagagcaagggcaaagtcattgggaaaagttcgggaaaagaagcaaccgttgttcagttacctatctccaaaggcattgctggtgtgagcatgactcttgaaccgggtgcgatgcgcgaattgcactggcatgccacagcagcagagtgggctttcgtattaaccggccacgtccgtacgacggtgatcgatccacaaggtgcggccgaaaccaacgactttggaccgggcgacgtgtggtattttcctcgcggtcatgggcacatgctggaatgcctgggcgatgcaccggcgcatttcattctgatcttcgataacggctacttctcagagtttggcaccttctctattactgactggatcggtcacacaccgaaagcgcttctcgccaagaactttggtctgcccgaatcggcttttgatgggtttcccaaagacgaggtctattttgcacgtggcgcggttccaccagccacccctgcagcgcctttacagggactgaagttgccaccactcacgcataaatacgaactcctcgaacaagctcctcataaagttttcaaaggtggtcgtgaatggcgcgtggatagcacccgttttcccatttccaagactgtaaccggcgttgttcttgatttggaacccggcgcgttacgcgagcttcactggcatcctaatgctgacgagtggcaatatgtgatcgatggcaacattagtgtgacgatgttcggttctcatggccgttaccgcaccgaacagatggagaaaggtgatgtcgggtatattccacaggggtatggccacagcatcgaaaatgtgggagatcgtccttgtcgcgtcttgattggctttaacacaggtaactaccaagcgatcgacttatcacagtggattgcaggtaatcccgcggatgttcttgccacgaacttctccaaacccacgagcctctttgaaaagttcccaaaacaggacgtgtttattgctcctggcaagggccaaactggccaccatcaccatcaccat

SEQ ID NO: 226 - protein, 369 aa, synthetic construct
  REGION 1..369: note = Variant of oxalate decarboxylase from Gemmata sp. SH-PL17
MGDPTFMNNVPDHLLADKDLPTFKFALEKSKGKVIGKSSGKEATVVQLPISKGIAGVSMTLEPGAMRELHWHATAAEWAFVLTGHVRTTVIDPQGAAETNDFGPGDVWYFPRGHGHMLECLGDAPAHFILIFDNGYFSEFGTFSITDWIGHTPKALLAKNFGLPESAFDGFPKDEVYFARGAVPPATPAAPLQGLKLPPLTHKYELLEQAPHKVFKGGREWRVDSTRFPISKTVTGVVLDLEPGALRELHWHPNADEWQYVIDGNISVTMFGSHGRYRTEQMEKGDVGYIPQGYGHSIENVGDRPCRVLIGFNTGNYQAIDLSQWIAGNPADVLATNFSKPTSLFEKFPKQDVFIAPGKGQTGHHHHHH

SEQ ID NO: 227 - DNA, 1107 bp, synthetic construct
  misc_feature 1..1107: note = Variant of oxalate decarboxylase from Gemmata sp. SH-PL17
  source 1..1107: mol_type = other DNA
atgggtgatccgacctttatgaataatgtgccagaccatctgctgtcggataaagatttgccgacgttcaagtttgcactggaaaagagcaagggcaaagtcattgggaaaagttcgggaaaagaagcaaccgttgttcagttacctatctccaaaggcattgctggtgtgagcatgactcttgaaccgggtgcgatgcgcgaattgcactggcatgccacagcagcagagtgggctttcgtattaaccggccacgtccgtacgacggtgatcgatccacaaggtgcggccgaaaccaacgactttggaccgggcgacgtgtggtattttcctcgcggtcatgggcacatgctggaatgcctgggcgataaaccggcgcatttcattctgatcttcgataacggctacttctcagagtttggcaccttctctattactgactggatcggtcacacaccgaaagcgcttctcgccaagaactttggtctgcccgaatcggcttttgatgggtttcccaaaaaagaggtctattttgcacgtggcgcggttccaccagccacccctgcagcgcctttacagggacgtgtattgccaccactcacgcataaatacgaactcctcgaacaagctcctcataaagttttcaaaggtggtcgtgaatggcgcgtggatagcacgcgttttcccatttccaagactgtaaccggcgttgttcttgatttggaacccggcgcgttacgcgagcttcactggcatcctaatgctgacgagtggcaatatgtgatcgatggcaacattagtgtgacgatgttcggttctcatggccgttaccgcaccgaacagatggagaagggtgatgtcgggtatattccacaggggtatggccacagcatcgaaaatgtgggagatcgtccttgtcgcgtcttgattggctttaacacaggtaactaccaagcgatcgacttatcacagtggattgcaggtaatcccgcggatgttcttgccacgaacttctccaaacccaccagcctctttgaaaagttcccaaaacaggacgtgtttattgctcctggcaagggccaaactggccaccatcaccatcaccat

SEQ ID NO: 228 - protein, 369 aa, synthetic construct
  REGION 1..369: note = Variant of oxalate decarboxylase from Gemmata sp. SH-PL17
MGDPTFMNNVPDHLLSDKDLPTFKFALEKSKGKVIGKSSGKEATVVQLPISKGIAGVSMTLEPGAMRELHWHATAAEWAFVLTGHVRTTVIDPQGAAETNDFGPGDVWYFPRGHGHMLECLGDKPAHFILIFDNGYFSEFGTFSITDWIGHTPKALLAKNFGLPESAFDGFPKKEVYFARGAVPPATPAAPLQGRVLPPLTHKYELLEQAPHKVFKGGREWRVDSTRFPISKTVTGVVLDLEPGALRELHWHPNADEWQYVIDGNISVTMFGSHGRYRTEQMEKGDVGYIPQGYGHSIENVGDRPCRVLIGFNTGNYQAIDLSQWIAGNPADVLATNFSKPTSLFEKFPKQDVFIAPGKGQTGHHHHHH

SEQ ID NO: 229 - DNA, 1107 bp, synthetic construct
  misc_feature 1..1107: note = Variant of oxalate decarboxylase from Gemmata sp. SH-PL17
  source 1..1107: mol_type = other DNA
atgggtgatccgacctttatgaataatgtgccagaccatctgctggcggcgaaagatttgccgacgttcaagtttgccctggaaaagagcaagggcaaagtcattgggaaaagttcgggaaaagaagcaaccgttgttcagttacctatctccaaaggcattgctggtgtgagcatgactcttgaaccgggtgcgatgcgcgaattgcactggcatgccacagcagcagagtgggctttcgtattaaccggccacgtccgtacgacggtgatcgatccacaaggtgcggccgaaaccaacgactttggaccgggcgacgtgtggtattttcctcgcggtcatgggcacatgctggaatgcctgggcgataaaccggcgcatttcattctgatcttcgataacggctacttctcagagtttggcaccttctctattactgactggatcggtcacacaccgaaagcgcttctcgccaagaactttggtctgcccgaatcggcttttgatgggtttcccaaagacgaggtctattttgcacgtggcgcggttccaccagccacccctgcagcgcctttacagggacgcaaattgccaccactcacgcataaatacgaactcctcgaacaagctcctcataaagttttcaaaggtggtcgtgaatggcgcgtggatagcacccgttttcccatttccaagactgtaaccggcgttgttcttgatttggaacccggcgcgttacgcgagcttcactggcatcctaatgctgacgagtggcaatatgtgatcgatggcaacattagtgtgacgatgttcggttctcatggccgttaccgcaccgaacagatggagaaaggtgatgtcgggtatattccacaggggtatggccacagcatcgaaaatgtgggagatcgtccttgtcgcgtcttgattggctttaacacaggtaactaccaagcgatcgacttatcacagtggattgcaggtaatcccgcggatgttcttgccacgaacttctccaaacccaccagcctctttgaaaagttcccaaaacaggacgtgtttattgctcctggcaagggccaaactggccaccatcaccatcaccat

SEQ ID NO: 230 - protein, 369 aa, synthetic construct
  REGION 1..369: note = Variant of oxalate decarboxylase from Gemmata sp. SH-PL17
MGDPTFMNNVPDHLLAAKDLPTFKFALEKSKGKVIGKSSGKEATVVQLPISKGIAGVSMTLEPGAMRELHWHATAAEWAFVLTGHVRTTVIDPQGAAETNDFGPGDVWYFPRGHGHMLECLGDKPAHFILIFDNGYFSEFGTFSITDWIGHTPKALLAKNFGLPESAFDGFPKDEVYFARGAVPPATPAAPLQGRKLPPLTHKYELLEQAPHKVFKGGREWRVDSTRFPISKTVTGVVLDLEPGALRELHWHPNADEWQYVIDGNISVTMFGSHGRYRTEQMEKGDVGYIPQGYGHSIENVGDRPCRVLIGFNTGNYQAIDLSQWIAGNPADVLATNFSKPTSLFEKFPKQDVFIAPGKGQTGHHHHHH

SEQ ID NO: 231 - DNA, 1107 bp, synthetic construct
  misc_feature 1..1107: note = Variant of oxalate decarboxylase from Gemmata sp. SH-PL17
  source 1..1107: mol_type = other DNA
atgggtgatccgacctttatgaataatgtgccagaccatctgctggcggataaagatttgccgacgttcaagtttgccctggaaaagagcaagggcaaagtcattgggaaaagttcgggaaaagaagcaaccgttgttcagttacctatctccaaaggcattgctggtgtgagcatgactcttgaaccgggtgcgatgcgcgaattgcactggcatgccacagcagcagagtgggctttcgtattaaccggccacgtccgtacgacggtgatcgatccacaaggtgcggccgaaaccaacgactttggaccgggcgacgtgtggtattttcctcgcggtcatgggcacatgctggaatgcctgggcgataaaccggcgcatttcattctgatcttcgataacggctacttctcagagtttggcaccttctctattactgactggatcggtcacacaccgaaagcgcttctcgccaagaactttggtctgcccgaatcggcttttgatgggtttcccaaagacgaggtctattttgcacgtggcgcggttccaccagccaccgctgcagcgcctttacagggacgcaaattgccaccactcacgcataaatacgaactcctcgaacaagctcctcataaagttttcaaaggtggtcgtgaatggcgcgtggatagcacccgttttcccatttccaagactgtaaccggcgttgttcttgatttggaacccggcgcgttacgcgagcttcactggcatcctaatgctgacgagtggcaatatgtgatcgatggcaacattagtgtgacgatgttcggttctcatggccgttaccgcaccgaacagatggagaaaggtgatgtcgggtatattccacaggggtatggccacagcatcgaaaatgtgggagatcgtccttgtcgcgtcttgattggctttaacacaggtaactaccaagcgatcgacttatcacagtggattgcaggtaatcccgcggatgttcttgccacgaacttctccaaacccaccagcctctttgaaaagttcccaaaacaggacgtgtttattgctcctggcaagggccaaactggccaccatcaccatcaccat

SEQ ID NO: 232 - protein, 369 aa, synthetic construct
  REGION 1..369: note = Variant of oxalate decarboxylase from Gemmata sp. SH-PL17
MGDPTFMNNVPDHLLADKDLPTFKFALEKSKGKVIGKSSGKEATVVQLPISKGIAGVSMTLEPGAMRELHWHATAAEWAFVLTGHVRTTVIDPQGAAETNDFGPGDVWYFPRGHGHMLECLGDKPAHFILIFDNGYFSEFGTFSITDWIGHTPKALLAKNFGLPESAFDGFPKDEVYFARGAVPPATAAAPLQGRKLPPLTHKYELLEQAPHKVFKGGREWRVDSTRFPISKTVTGVVLDLEPGALRELHWHPNADEWQYVIDGNISVTMFGSHGRYRTEQMEKGDVGYIPQGYGHSIENVGDRPCRVLIGFNTGNYQAIDLSQWIAGNPADVLATNFSKPTSLFEKFPKQDVFIAPGKGQTGHHHHHH

SEQ ID NO: 233 - DNA, 1107 bp, synthetic construct
  misc_feature 1..1107: note = Variant of oxalate decarboxylase from Gemmata sp. SH-PL17
  source 1..1107: mol_type = other DNA
atgggtgatccgacctttatgaataatgtgccagaccatctgctggcggataaagatttgccgacgttcaagtttgcactggaaaagagcaagggcaaagtcattgggaaaagttcgggaaaagaagcaaccgttgttcagttacctatctccaaaggcattgctggtgtgagcatgactcttgaaccgggtgcgatgcgcgaattgcactggcatgccacagcagcagagtgggctttcgtattaaccggccacgtccgtacgacggtgatcgatccacaaggtgcggccgaaaccaacgactttggaccgggcgacgtgtggtattttcctcgcggtcatgggcacatgctggaatgcctgggcgataaaccggcgcatttcattctgatcttcgataacggctacttctcagagtttggcaccttctctattactgactggatcggtcacacaccgaaagcgcttctcgccaagaactttggtctgcccgaatcggcttttgatgggtttcccaaagacgaggtctattttgcacgtggcgcggttccaccagccacccctgcagcgcctttacagggactggtattgccaccactcacgcataaatacgaactcctcgaacaagaacctcataaagttttcaaaggtggtcgtgaatggcgcgtggatagcacgcgttttcccatttccaagactgtaaccggcgttgttcttgatttggaacccggcgcgttacgcgagcttcactggcatcctaatgctgacgagtggcaatatgtgatcgatggcaacattagtgtgacgatgttcggttctcatggccgttaccgcaccgaacagatggagaagggtgatgtcgggtatattccacaggggtatggccacagcatcgaaaatgtgggagatcgtccttgtcgcgtcttgattggctttaacacaggtaactaccaagcgatcgacttatcacagtggattgcaggtaatcccgcggatgttcttgccacgaacttctccaaacccaccagcctctttgaaaagttcccaaaacaggacgtgtttattgctcctggcaagggccaaactggccaccatcaccatcaccat

SEQ ID NO: 234 - protein, 369 aa, synthetic construct
  REGION 1..369: note = Variant of oxalate decarboxylase from Gemmata sp. SH-PL17
MGDPTFMNNVPDHLLADKDLPTFKFALEKSKGKVIGKSSGKEATVVQLPISKGIAGVSMTLEPGAMRELHWHATAAEWAFVLTGHVRTTVIDPQGAAETNDFGPGDVWYFPRGHGHMLECLGDKPAHFILIFDNGYFSEFGTFSITDWIGHTPKALLAKNFGLPESAFDGFPKDEVYFARGAVPPATPAAPLQGLVLPPLTHKYELLEQEPHKVFKGGREWRVDSTRFPISKTVTGVVLDLEPGALRELHWHPNADEWQYVIDGNISVTMFGSHGRYRTEQMEKGDVGYIPQGYGHSIENVGDRPCRVLIGFNTGNYQAIDLSQWIAGNPADVLATNFSKPTSLFEKFPKQDVFIAPGKGQTGHHHHHH

SEQ ID NO: 235 - DNA, 1107 bp, synthetic construct
  misc_feature 1..1107: note = Variant of oxalate decarboxylase from Gemmata sp. SH-PL17
  source 1..1107: mol_type = other DNA
atgggtgatccgacctttatgaataatgtgccagaccatctgctggcggataaagatttgccgacgttcaagtttgcactggaaaagagcaagggcaaagtcattgggaaaagttcgggaaaagaagcaaccgttgttcagttacctatctccaaaggcattgctggtgtgagcatgactcttgaaccgggtgcgatgcgcgaattgcactggcatgccacagcagcagagtgggctttcgtattaaccggccacgtccgtacgacggtgatcgatccacaaggtgcggccgaaaccaacgactttggaccgggcgacgtgtggtattttcctcgcggtcatgggcacatgctggaatgcctgggcgataaaccggcgcatttcattctgatcttcgataacggctacttctcagagtttggcaccttctctattactgactggatcggtcacacaccgaaagcgcttctcgccaagaactttggtctgcccgaatcggcttttgatgggtttcccaaaaaagaggtctattttgcacgtggcgcggttccaccagccacccctgcagcgcctttacagggacgtgtattgccaccactcacgcataaatacgaactcctcgaacaagaacctcataaagttttcaaaggtggtcgtgaatggcgcgtggatagcacgcgttttcccatttccaagactgtaaccggcgttgttcttgatttggaacccggcgcgttacgcgagcttcactggcatcctaatgctgacgagtggcaatatgtgatcgatggcaacattagtgtgacgatgttcggttctcatggccgttaccgcaccgaacagatggagaagggtgatgtcgggtatattccacaggggtatggccacagcatcgaaaatgtgggagatcgtccttgtcgcgtcttgattggctttaacacaggtaactaccaagcgatcgacttatcacagtggattgcaggtaatcccgcggatgttcttgccacgaacttctccaaacccaccagcctctttgaaaagttcccaaaacaggacgtgtttattgctcctggcaagggccaaactggccaccatcaccatcaccat

SEQ ID NO: 236 - protein, 369 aa, synthetic construct
  REGION 1..369: note = Variant of oxalate decarboxylase from Gemmata sp. SH-PL17
MGDPTFMNNVPDHLLADKDLPTFKFALEKSKGKVIGKSSGKEATVVQLPISKGIAGVSMTLEPGAMRELHWHATAAEWAFVLTGHVRTTVIDPQGAAETNDFGPGDVWYFPRGHGHMLECLGDKPAHFILIFDNGYFSEFGTFSITDWIGHTPKALLAKNFGLPESAFDGFPKKEVYFARGAVPPATPAAPLQGRVLPPLTHKYELLEQEPHKVFKGGREWRVDSTRFPISKTVTGVVLDLEPGALRELHWHPNADEWQYVIDGNISVTMFGSHGRYRTEQMEKGDVGYIPQGYGHSIENVGDRPCRVLIGFNTGNYQAIDLSQWIAGNPADVLATNFSKPTSLFEKFPKQDVFIAPGKGQTGHHHHHH

SEQ ID NO: 237 - DNA, 1107 bp, synthetic construct
  misc_feature 1..1107: note = Variant of oxalate decarboxylase from Gemmata sp. SH-PL17
  source 1..1107: mol_type = other DNA
atgggtgatccgtgttttatgaataatgtgccagaccatctgctggcggataaagatttgccgacgttcaagtttgccctggaaaagagcaagggcaaagtcattgggaaaagttcgggaaaagaagcaaccgttgttcagttacctatctccaaaggcattgctggtgtgagcatgactcttgaaccgggtgcgatgcgcgaattgcactggcatgccacagcagcagagtgggctttcgtattaaccggccacgtccgtacgacggtgatcgatccacaaggtgcggccgaaaccaacgactttggaccgggcgacgtgtggtattttcctcgcggtcatgggcacatgctggaatgcctgggcgataaaccggcgcatttcattctgatcttcgataacggctacttctcagagtttggcaccttctctattactgactggatcggtcacacaccgaaagcgcttctcgccaagaactttggtctgcccgaatcggcttttgatgggtttcccaaagacgaggtctattttgcacgtggcgcggttccaccagccacccctgcagcgcctttacagggacgcaaattgccaccactcacgcataaatacgaactcctcgaacaagctcctcataaagttttcaaaggtggtcgtgaatggcgcgtggatagcacccgttttcccatttccaagactgtaaccggcgttgttcttgatttggaacccggcgcgttacgcgagcttcactggcatcctaatgctgacgagtggcaatatgtgatcgatggcaacattagtgtgacgatgttcggttctcatggccgttaccgcaccgaacagatggagaaaggtgatgtcgggtatattccacaggggtatggccacagcatcgaaaatgtgggagatcgtccttgtcgcgtcttgattggctttaacacaggtaactaccaagcgatcgacttatcacagtggattgcaggtaatcccgcggatgttcttgccacgaacttctccaaacccaccagcctctttgaaaagttcccaaaacaggacgtgtttattgctcctggcaagggccaaactggccaccatcaccatcaccat

SEQ ID NO: 238 - protein, 369 aa, synthetic construct
  REGION 1..369: note = Variant of oxalate decarboxylase from Gemmata sp. SH-PL17
MGDPCFMNNVPDHLLADKDLPTFKFALEKSKGKVIGKSSGKEATVVQLPISKGIAGVSMTLEPGAMRELHWHATAAEWAFVLTGHVRTTVIDPQGAAETNDFGPGDVWYFPRGHGHMLECLGDKPAHFILIFDNGYFSEFGTFSITDWIGHTPKALLAKNFGLPESAFDGFPKDEVYFARGAVPPATPAAPLQGRKLPPLTHKYELLEQAPHKVFKGGREWRVDSTRFPISKTVTGVVLDLEPGALRELHWHPNADEWQYVIDGNISVTMFGSHGRYRTEQMEKGDVGYIPQGYGHSIENVGDRPCRVLIGFNTGNYQAIDLSQWIAGNPADVLATNFSKPTSLFEKFPKQDVFIAPGKGQTGHHHHHH

SEQ ID NO: 239 - DNA, 1107 bp, synthetic construct
  misc_feature 1..1107: note = Variant of oxalate decarboxylase from Gemmata sp. SH-PL17
  source 1..1107: mol_type = other DNA
atgggtgatccgacctttatgaataatgtgccagaccatctgctgtcggataaagatttgccgacgttcaagtttgaactggaaaagagcaagggcaaagtcattgggaaaagttcgggaaaagaagcaaccgttgttcagttacctatctccaaaggcattgctggtgtgagcatgactcttgaaccgggtgcgatgcgcgaattgcactggcatgccacagcagcagagtgggctttcgtattaaccggccacgtccgtacgacggtgatcgatccacaaggtgcggccgaaaccaacgactttggaccgggcgacgtgtggtattttcctcgcggtcatgggcacatgctggaatgcctgggcgataaaccggcgcatttcattctgatcttcgataacggctacttctcagagtttggcaccttctctattactgactggatcggtcacacaccgaaaccgcttctcgccaagaactttggtctgcccgaatcggcttttgatgggtttcccaaaaaagaggtctattttgcacgtggcgcggttccaccagccacccctgcagcgcctttacagggacgtaagttgccaccactcacgcataaatacgaactcctcgaacaagctcctcataaagttttcaaaggtggtcgtgaatggcgcgtggatagcacccgttttcccatttccaagactgtaaccggcgttgttcttgatttggaacccggcgcgttacgcgagcttcactggcatcctaatgctgacgagtggcaatatgtgatcgatggcaacattagtgtgacgatgttcggttctcatggccgttaccgcaccgaacagatggagaagggtgatgtcgggtatattccacaggggtatggccacagcatcgaaaatgtgggagatcgtccttgtcgcgtcttgattggctttaacacaggtaactaccaagcgatcgacttatcacagtggattgcaggtaatcccgcggatgttcttgccacgaacttctccaaacccaccagcctctttgaaaagttcccaaaacaggacgtgtttattgctcctggcaagggccaaactggccaccatcaccatcaccat

SEQ ID NO: 240 - protein, 369 aa, synthetic construct
  REGION 1..369: note = Variant of oxalate decarboxylase from Gemmata sp. SH-PL17
MGDPTFMNNVPDHLLSDKDLPTFKFELEKSKGKVIGKSSGKEATVVQLPISKGIAGVSMTLEPGAMRELHWHATAAEWAFVLTGHVRTTVIDPQGAAETNDFGPGDVWYFPRGHGHMLECLGDKPAHFILIFDNGYFSEFGTFSITDWIGHTPKPLLAKNFGLPESAFDGFPKKEVYFARGAVPPATPAAPLQGRKLPPLTHKYELLEQAPHKVFKGGREWRVDSTRFPISKTVTGVVLDLEPGALRELHWHPNADEWQYVIDGNISVTMFGSHGRYRTEQMEKGDVGYIPQGYGHSIENVGDRPCRVLIGFNTGNYQAIDLSQWIAGNPADVLATNFSKPTSLFEKFPKQDVFIAPGKGQTGHHHHHH

SEQ ID NO: 241 - DNA, 1107 bp, synthetic construct
  misc_feature 1..1107: note = Variant of oxalate decarboxylase from Gemmata sp. SH-PL17
  source 1..1107: mol_type = other DNA
atgggtgatccgacctttatgaataatgtgccagaccatctgctgtcggataaagatttgccgacgttcaagtttgccctggaaaagagcaagggcaaagtcattgggaaaagttcgggaaaagaagcaaccgttgttcagttacctatctccaaaggcattgctggtgtgagcatgactcttgaaccgggtgcgatgcgcgaattgcactggcatgccacagcagcagagtgggctttcgtattaaccggccacgtccgtacgacggtgatcgatccacaaggtgcggccgaaaccaacgactttggaccgggcgacgtgtggtattttcctcgcggtcatgggcacatgctggaatgcctgggcgataaaccggcgcatttcattctgatcttcgataacggctacttctcagagtttggcaccttctctattactgactggatcggtcacacaccgaaaccgcttctcgccaagaactttggtctgcccgaatcggcttttgatgggtttcccaaagatgaggtctattttgcacgtggcgcggttccaccagccacccctgcagcgcctttacagggactggtattgccaccactcacgcataaatacgaactcctcgaacaagctcctcataaagttttcaaaggtggtcgtgaatggcgcgtggatagctcgcgttttcccatttccaagactgtaaccggcgttgttcttgatttggaacccggcgcgttacgcgagcttcactggcatcctaatgctgacgagtggcaatatgtgatcgatggcaacattagtgtgacgatgttcggttctcatggccgttaccgcaccgaacagatggagaagggtgatgtcgggtatattccacaggggtatggccacagcatcgaaaatgtgggagatcgtccttgtcgcgtcttgattggctttaacacaggtaactaccaagcgatcgacttatcacagtggattgcaggtaatcccgcggatgttcttgccacgaacttctccaaacccaccagcctctttgaaaagttcccaaaacaggacgtgtttattgctcctggcaagggccaaactggccaccatcaccatcaccat

SEQ ID NO: 242 - protein, 369 aa, synthetic construct
  REGION 1..369: note = Variant of oxalate decarboxylase from Gemmata sp. SH-PL17
MGDPTFMNNVPDHLLSDKDLPTFKFALEKSKGKVIGKSSGKEATVVQLPISKGIAGVSMTLEPGAMRELHWHATAAEWAFVLTGHVRTTVIDPQGAAETNDFGPGDVWYFPRGHGHMLECLGDKPAHFILIFDNGYFSEFGTFSITDWIGHTPKPLLAKNFGLPESAFDGFPKDEVYFARGAVPPATPAAPLQGLVLPPLTHKYELLEQAPHKVFKGGREWRVDSSRFPISKTVTGVVLDLEPGALRELHWHPNADEWQYVIDGNISVTMFGSHGRYRTEQMEKGDVGYIPQGYGHSIENVGDRPCRVLIGFNTGNYQAIDLSQWIAGNPADVLATNFSKPTSLFEKFPKQDVFIAPGKGQTGHHHHHH

SEQ ID NO: 243 - DNA, 1107 bp, synthetic construct
  misc_feature 1..1107: note = Variant of oxalate decarboxylase from Gemmata sp. SH-PL17
  source 1..1107: mol_type = other DNA
atgggtgatccgacctttatgaataatgtgccagaccatctgctggcggataaagatttgccgacgttcaagtttgccctggaaaagagcaagggcaaagtcattgggaaaagttcgggaaaagaagcaaccgttgttcagttacctatctccaaaggcattgctggtgtgagcatgactcttgaaccgggtgcgatgcgcgaattgcactggcatgccacagcagcagagtgggctttcgtattaaccggccacgtccgtacgacggtgatcgatccacaaggtgcggccgaaaccaacgactttggaccgggcgacgtgtggtattttcctcgcggtcatgggcacatgctggaatgcctgggcgataaaccggcgcatttcattctgatcttcgataacggctacttctcagagtttggcaccttctctattactgactggatcggtcacacaccgaaagcgcttctcgccaagaactttggtctgcccgaatcggcttttgatgggtttcccaaagacgaggtctattttgcacgtggcgcggttccaccagccacccctgcagcgcctttacagggactgaagttgccaccactcacgcataaatacgaactcctcgaacaagctcctcataaagttttcaaaggtggtcgtgaatggcgcgtggatagctcgcgttttcccatttccaagactgtaaccggcgttgttcttgatttggaacccggcgcgttacgcgagcttcactggcatcctaatgctgacgagtggcaatatgtgatcgatggcaacattagtgtgacgatgttcggttctcatggccgttaccgcaccgaacagatggaggcgggtgatgtcgggtatattccacaggggtatggccacagcatcgaaaatgtgggagatcgtccttgtcgcgtcttgattggctttaacacaggtaactaccaagcgatcgacttatcacagtggattgcaggtaatcccgcggatgttcttgccacgaacttctccaaacccaccagcctctttgaaaagttcccaaaacaggacgtgtttattgctcctggcaagggccaaactggccaccatcaccatcaccat

SEQ ID NO: 244 - protein, 369 aa, synthetic construct
  REGION 1..369: note = Variant of oxalate decarboxylase from Gemmata sp. SH-PL17
MGDPTFMNNVPDHLLADKDLPTFKFALEKSKGKVIGKSSGKEATVVQLPISKGIAGVSMTLEPGAMRELHWHATAAEWAFVLTGHVRTTVIDPQGAAETNDFGPGDVWYFPRGHGHMLECLGDKPAHFILIFDNGYFSEFGTFSITDWIGHTPKALLAKNFGLPESAFDGFPKDEVYFARGAVPPATPAAPLQGLKLPPLTHKYELLEQAPHKVFKGGREWRVDSSRFPISKTVTGVVLDLEPGALRELHWHPNADEWQYVIDGNISVTMFGSHGRYRTEQMEAGDVGYIPQGYGHSIENVGDRPCRVLIGFNTGNYQAIDLSQWIAGNPADVLATNFSKPTSLFEKFPKQDVFIAPGKGQTGHHHHHH

SEQ ID NO: 245 - DNA, 1107 bp, synthetic construct
  misc_feature 1..1107: note = Variant of oxalate decarboxylase from Gemmata sp. SH-PL17
  source 1..1107: mol_type = other DNA
atgggtgatccgacctttatgaataatgtgccagaccatctgctggcgaataaagatttgccgacgttcaagtttgccctggaaaagagcaagggcaaagtcattgggaaaagttcgggaaaagaagcaaccgttgttcagttacctatctccaaaggcattgctggtgtgagcatgactcttgaaccgggtgcgatgcgcgaattgcactggcatgccacagcagcagagtgggctttcgtattaaccggccacgtccgtacgacggtgatcgatccacaaggtgcggccgaaaccaacgactttggaccgggcgacgtgtggtattttcctcgcggtcatgggcacatgctggaatgcctgggcgataaaccggcgcatttcattctgatcttcgataacggctacttctcagagtttggcaccttctctattactgactggatcggtcacacaccgaaagcgcttctcgccaagaactttggtctgcccgaatcggcttttgatgggtttcccaaagacgaggtctattttgcacgtggcgcggttccaccagccacccctgcagcgcctttacagggacgcaaattgccaccactcacgcataaatacgaactcctcgaacaagctcctcataaagttttcaaaggtggtcgtgaatggcgcgtggatagcacccgttttcccatttccaagactgtaaccggcgttgttcttgatttggaacccggcgcgttacgcgagcttcactggcatcctaatgctgacgagtggcaatatgtgatcgatggcaacattagtgtgacgatgttcggttctcatggccgttaccgcaccgaacagatggagaaaggtgatgtcgggtatattccacaggggtatggccacagcatcgaaaatgtgggagatcgtccttgtcgcgtcttgattggctttaacacaggtaactaccaagcgatcgacttatcacagtggattgcaggtaatcccgcggatgttcttgccacgaacttctccaaacccaccagcctctttgaaaagttcccaaaacaggacgtgtttattgctcctggcaagggccaaactggccaccatcaccatcaccat

SEQ ID NO: 246 - protein, 369 aa, synthetic construct
  REGION 1..369: note = Variant of oxalate decarboxylase from Gemmata sp. SH-PL17
MGDPTFMNNVPDHLLANKDLPTFKFALEKSKGKVIGKSSGKEATVVQLPISKGIAGVSMTLEPGAMRELHWHATAAEWAFVLTGHVRTTVIDPQGAAETNDFGPGDVWYFPRGHGHMLECLGDKPAHFILIFDNGYFSEFGTFSITDWIGHTPKALLAKNFGLPESAFDGFPKDEVYFARGAVPPATPAAPLQGRKLPPLTHKYELLEQAPHKVFKGGREWRVDSTRFPISKTVTGVVLDLEPGALRELHWHPNADEWQYVIDGNISVTMFGSHGRYRTEQMEKGDVGYIPQGYGHSIENVGDRPCRVLIGFNTGNYQAIDLSQWIAGNPADVLATNFSKPTSLFEKFPKQDVFIAPGKGQTGHHHHHH

SEQ ID NO: 247 - DNA, 1107 bp, synthetic construct
  misc_feature 1..1107: note = Variant of oxalate decarboxylase from Gemmata sp. SH-PL17
  source 1..1107: mol_type = other DNA
atgggtgatccgacctttatgaataatgtgccagaccatctgctgttggataaagatttgccgacgttcaagtttgccctggaaaagagcaagggcaaagtcattgggaaaagttcgggaaaagaagcaaccgttgttcagttacctatctccaaaggcattgctggtgtgagcatgactcttgaaccgggtgcgatgcgcgaattgcactggcatgccacagcagcagagtgggctttcgtattaaccggccacgtccgtacgacggtgatcgatccacaaggtgcggccgaaaccaacgactttggaccgggcgacgtgtggtattttcctcgcggtcatgggcacatgctggaatgcctgggcgataaaccggcgcatttcattctgatcttcgataacggctacttctcagagtttggcaccttctctattactgactggatcggtcacacaccgaaagcgcttctcgccaagaactttggtctgcccgaatcggcttttgatgggtttcccaaagacgaggtctattttgcacgtggcgcggttccaccagccacccctgcagcgcctttacagggacgcaaattgccaccactcacgcataaatacgaactcctcgaacaagctcctcataaagttttcaaaggtggtcgtgaatggcgcgtggatagcacccgttttcccatttccaagactgtaaccggcgttgttcttgatttggaacccggcgcgttacgcgagcttcactggcatcctaatgctgacgagtggcaatatgtgatcgatggcaacattagtgtgacgatgttcggttctcatggccgttaccgcaccgaacagatggagaaaggtgatgtcgggtatattccacaggggtatggccacagcatcgaaaatgtgggagatcgtccttgtcgcgtcttgattggctttaacacaggtaactaccaagcgatcgacttatcacagtggattgcaggtaatcccgcggatgttcttgccacgaacttctccaaacccaccagcctctttgaaaagttcccaaaacaggacgtgtttattgctcctggcaagggccaaactggccaccatcaccatcaccat

SEQ ID NO: 248 - protein, 369 aa, synthetic construct
  REGION 1..369: note = Variant of oxalate decarboxylase from Gemmata sp. SH-PL17
MGDPTFMNNVPDHLLLDKDLPTFKFALEKSKGKVIGKSSGKEATVVQLPISKGIAGVSMTLEPGAMRELHWHATAAEWAFVLTGHVRTTVIDPQGAAETNDFGPGDVWYFPRGHGHMLECLGDKPAHFILIFDNGYFSEFGTFSITDWIGHTPKALLAKNFGLPESAFDGFPKDEVYFARGAVPPATPAAPLQGRKLPPLTHKYELLEQAPHKVFKGGREWRVDSTRFPISKTVTGVVLDLEPGALRELHWHPNADEWQYVIDGNISVTMFGSHGRYRTEQMEKGDVGYIPQGYGHSIENVGDRPCRVLIGFNTGNYQAIDLSQWIAGNPADVLATNFSKPTSLFEKFPKQDVFIAPGKGQTGHHHHHH

SEQ ID NO: 249 - DNA, 1107 bp, synthetic construct
  misc_feature 1..1107: note = Variant of oxalate decarboxylase from Gemmata sp. SH-PL17
  source 1..1107: mol_type = other DNA
atgggtgatccgacctttatgaataatgtgccagaccatctgctggcggataaagatttgccgacgttcaagtttgccctggaaaagagcaagggcaaagtcattgggaaaagttcgggaaaagaagcaaccgttgttcagttacctatctccaaaggcattgctggtgtgagcatgactcttgaaccgggtgcgatgcgcgaattgcactggcatgccacagcagcagagtgggctttcgtattaaccggccacgtccgtacgacggtgatcgatccacaaggtgcggccgaaaccaacgactttggaccgggcgacgtgtggtattttcctcgcggtcatgggcacatgctggaatgcctgggcgataaaccggcgcatttcattctgatcttcgataacggctacttctcagagtttggcaccttctctattactgactggatcggtcacacaccgaaagcgcttctcgccaagaactttggtctgcccgaatcggcttttgatgggtttcccaaagacgaggtctattttgcacgtggcgcggttccaccagccacccctgcagcgcctttacagggacgcaaattgccaccactcacgcataaatacgaactcctcgaacaagctcctcataaagttttcaaaggtggtcgtgaatggcgcgtggatagcacccgttttcccatttccaagactgtaaccggcgttgttcttgagttggaacccggcgcgttacgcgagcttcactggcatcctaatgctgacgagtggcaatatgtgatcgatggcaacattagtgtgacgatgttcggttctcatggccgttaccgcaccgaacagatggagaaaggtgatgtcgggtatattccacaggggtatggccacagcatcgaaaatgtgggagatcgtccttgtcgcgtcttgattggctttaacacaggtaactaccaagcgatcgacttatcacagtggattgcaggtaatcccgcggatgttcttgccacgaacttctccaaacccaccagcctctttgaaaagttcccaaaacaggacgtgtttattgctcctggcaagggccaaactggccaccatcaccatcaccat

SEQ ID NO: 250 - protein, 369 aa, synthetic construct
  REGION 1..369: note = Variant of oxalate decarboxylase from Gemmata sp. SH-PL17
MGDPTFMNNVPDHLLADKDLPTFKFALEKSKGKVIGKSSGKEATVVQLPISKGIAGVSMTLEPGAMRELHWHATAAEWAFVLTGHVRTTVIDPQGAAETNDFGPGDVWYFPRGHGHMLECLGDKPAHFILIFDNGYFSEFGTFSITDWIGHTPKALLAKNFGLPESAFDGFPKDEVYFARGAVPPATPAAPLQGRKLPPLTHKYELLEQAPHKVFKGGREWRVDSTRFPISKTVTGVVLELEPGALRELHWHPNADEWQYVIDGNISVTMFGSHGRYRTEQMEKGDVGYIPQGYGHSIENVGDRPCRVLIGFNTGNYQAIDLSQWIAGNPADVLATNFSKPTSLFEKFPKQDVFIAPGKGQTGHHHHHH

SEQ ID NO: 251 - DNA, 1107 bp, synthetic construct
  misc_feature 1..1107: note = Variant of oxalate decarboxylase from Gemmata sp. SH-PL17
  source 1..1107: mol_type = other DNA
atgggtgatccgacctttatgaataatgtgccagaccatctgctgtcggataaagatttgccgacgttcaagtttgaactggaaaagagcaagggcaaagtcattgggaaaagttcgggaaaagaagcaaccgttgttcagttacctatctccaaaggcattgctggtgtgagcatgactcttgaaccgggtgcgatgcgcgaattgcactggcatgccacagcagcagagtgggctttcgtattaaccggccacgtccgtacgacggtgatcgatccacaaggtgcggccgaaaccaacgactttggaccgggcgacgtgtggtattttcctcgcggtcatgggcacatgctggaatgcctgggcgatgcaccggcgcatttcattctgatcttcgataacggctacttctcagagtttggcaccttctctattactgactggatcggtcacacaccgaaaccgcttctcgccaagaactttggtctgcccgaatcggcttttgatgggtttcccaaagatgaggtctattttgcacgtggcgcggttccaccagccacccctgcagcgcctttacagggactggtattgccaccactcacgcataaatacgaactcctcgaacaagctcctcataaagttttcaaaggtggtcgtgaatggcgcgtggatagctcgcgttttcccatttccaagactgtaaccggcgttgttcttgatttggaacccggcgcgttacgcgagcttcactggcatcctaatgctgacgagtggcaatatgtgatcgatggcaacattagtgtgacgatgttcggttctcatggccgttaccgcaccgaacagatggagaaaggtgatgtcgggtatattccacaggggtatggccacagcatcgaaaatgtgggagatcgtccttgtcgcgtcttgattggctttaacacaggtaactaccaagcgatcgacttatcacagtggattgcaggtaatcccgcggatgttcttgccacgaacttctccaaacccaccagcctctttgaaaagttcccaaaacaggacgtgtttattgctcctggcaagggccaaactggccaccatcaccatcaccat

SEQ ID NO: 252 - protein, 369 aa, synthetic construct
  REGION 1..369: note = Variant of oxalate decarboxylase from Gemmata sp. SH-PL17
MGDPTFMNNVPDHLLSDKDLPTFKFELEKSKGKVIGKSSGKEATVVQLPISKGIAGVSMTLEPGAMRELHWHATAAEWAFVLTGHVRTTVIDPQGAAETNDFGPGDVWYFPRGHGHMLECLGDAPAHFILIFDNGYFSEFGTFSITDWIGHTPKPLLAKNFGLPESAFDGFPKDEVYFARGAVPPATPAAPLQGLVLPPLTHKYELLEQAPHKVFKGGREWRVDSSRFPISKTVTGVVLDLEPGALRELHWHPNADEWQYVIDGNISVTMFGSHGRYRTEQMEKGDVGYIPQGYGHSIENVGDRPCRVLIGFNTGNYQAIDLSQWIAGNPADVLATNFSKPTSLFEKFPKQDVFIAPGKGQTGHHHHHH

SEQ ID NO: 253 - DNA, 1107 bp, synthetic construct
  misc_feature 1..1107: note = Variant of oxalate decarboxylase from Gemmata sp. SH-PL17
  source 1..1107: mol_type = other DNA
atgggtgatccgacctttatgaataatgtgccagaccatctgctggcggataaagatttgccgacgttcaagtttgccctggaaaagagcaagggcaaagtcattgggaaaagttcgggaaaagaagcaaccgttgttcagttacctatctccaaaggcattgctggtgtgagcatgactcttgaaccgggtgcgatgcgcgaattgcactggcatgccacagcagcagagtgggctttcgtattaaccggccacgtccgtacgacggtgatcgatccacaaggtgcggccgaaaccaacgactttggaccgggcgacgtgtggtattttcctcgcggtcatgggcacatgctggaatgcctgggcgataaaccggcgcatttcattctgatcttcgataacggctacttctcagagtttggcaccttctctattactgactggatcggtcacacaccgaaagcgcttctcgccaagaactttggtctgcccgaatcggcttttgatgggtttcccaaagacgaggtctattttgcacgtggcgcggttccaccagccacccctgcagcgcctttacagggacgcaaattgccaccactcacgcataaatacgaactcctcgaacaagctcctcataaagttttcaaaggtggtcgtgaatggcgcgtggatagcacccgttttcccatttccaagactgtaaccggcgttgttcttgatttggaacccggcgcgttacgcgagcttcactggcatcctaatgctgacgagtggcaatatgtgatcgatggcaacattagtgtgacgatgttcggttctcatggccgttaccgcaccgaacagatggagaaaggtgatgtcgggtatattccacaggggtatggccacagcatcgaaaatgtgggagatcgtccttgtcgcgtcttgattggctttaacacaggtaactaccaagcgatcgacttatcacagtggattgcaggtaatcccccggatgttcttgccacgaacttctccaaacccaccagcctctttgaaaagttcccaaaacaggacgtgtttattgctcctggcaagggccaaactggccaccatcaccatcaccat

SEQ ID NO: 254 - protein, 369 aa, synthetic construct
  REGION 1..369: note = Variant of oxalate decarboxylase from Gemmata sp. SH-PL17
MGDPTFMNNVPDHLLADKDLPTFKFALEKSKGKVIGKSSGKEATVVQLPISKGIAGVSMTLEPGAMRELHWHATAAEWAFVLTGHVRTTVIDPQGAAETNDFGPGDVWYFPRGHGHMLECLGDKPAHFILIFDNGYFSEFGTFSITDWIGHTPKALLAKNFGLPESAFDGFPKDEVYFARGAVPPATPAAPLQGRKLPPLTHKYELLEQAPHKVFKGGREWRVDSTRFPISKTVTGVVLDLEPGALRELHWHPNADEWQYVIDGNISVTMFGSHGRYRTEQMEKGDVGYIPQGYGHSIENVGDRPCRVLIGFNTGNYQAIDLSQWIAGNPPDVLATNFSKPTSLFEKFPKQDVFIAPGKGQTGHHHHHH

SEQ ID NO: 255 - DNA, 1107 bp, synthetic construct
  misc_feature 1..1107: note = Variant of oxalate decarboxylase from Gemmata sp. SH-PL17
  source 1..1107: mol_type = other DNA
atgggtgatccgacctttatgaataatgtgccagaccatctgctggcggataaagatttgccgacgttcaagtttgccctggaaaagagcaagggcaaagtcattgggaaaagttcgggaaaagaagcaaccgttgttcagttacctatctccaaaggcattgctggtgtgagcatgactcttgaaccgggtgcgatgcgcgaattgcactggcatgccacagcagcagagtgggctttcgtattaaccggccacgtccgtacgacggtgatcgatccacaaggtgcggccgaaaccaacgactttggaccgggcgacgtgtggtattttcctcgcggtcatgggcacatgctggaatgcctgggcgataaaccggcgcatttcattctgatcttcgataacggctacttctcagagtttggcaccttctctattactgactggatcggtcacacaccgaaagcgcttctcgccaagaactttggtctgcccgaatcggcttttgacgggtttcccaaggacgaggtctattttgcacgtggcgcgatcccaccagccacccctgcagcgcctttacagggacgcaaattgccaccactcacgcataaatacgaactgctcgaacaagctcctcataaagttttcaaaggtggtcgtgaatggcgcgtggatagcacccgttttcccatttccacgactgtaaccggcgttgttcttgatttggaacccggcgcgttacgcgagcttcactggcatcctaatgctgacgagtggcaatatgtgatcgatggcaacattagtgtgacgatgttcggttctcatggccgttaccgcaccgaacagatggagaaaggtgatgtcgggtatattccacaggggtatggccacagcatcgaaaatgtgggagatcgtccttgtcgcgtcttgattggctttaacacaggtaactaccaagcgatcgacttatcacagtggattgcaggtaatcccgcggatgttcttgccacgaacttcggcaaacccacccgcctctttgaaaagttcccaaaacaggacgtgtttattgctcctggcaagggccaaactggccaccatcaccatcaccat

SEQ ID NO: 256 - protein, 369 aa, synthetic construct
  REGION 1..369: note = Variant of oxalate decarboxylase from Gemmata sp. SH-PL17
MGDPTFMNNVPDHLLADKDLPTFKFALEKSKGKVIGKSSGKEATVVQLPISKGIAGVSMTLEPGAMRELHWHATAAEWAFVLTGHVRTTVIDPQGAAETNDFGPGDVWYFPRGHGHMLECLGDKPAHFILIFDNGYFSEFGTFSITDWIGHTPKALLAKNFGLPESAFDGFPKDEVYFARGAIPPATPAAPLQGRKLPPLTHKYELLEQAPHKVFKGGREWRVDSTRFPISTTVTGVVLDLEPGALRELHWHPNADEWQYVIDGNISVTMFGSHGRYRTEQMEKGDVGYIPQGYGHSIENVGDRPCRVLIGFNTGNYQAIDLSQWIAGNPADVLATNFGKPTRLFEKFPKQDVFIAPGKGQTGHHHHHH

SEQ ID NO: 257 - DNA, 1107 bp, synthetic construct
  misc_feature 1..1107: note = Variant of oxalate decarboxylase from Gemmata sp. SH-PL17
  source 1..1107: mol_type = other DNA
atgggtgatccgacctttatgaataatgtgccagaccatctgctggcggataaagatttgccgacgttcaagtttgccctggaaaagagcaagggcaaagtcattgggaaaagttcgggaaaagaagcaaccgttgttcagttacctatctccaaaggcattgctggtgtgagcatgactcttgaaccgggtgcgatgcgcgaattgcactggcatgccacagcagcagagtgggctttcgtattaaccggccacgtccgtacgacggtgatcgatccacaaggtgcggccgaaaccaacgactttggaccgggcgacgtgtggtattttcctcgcggtcatgggcacatgctggaatgcctgggcgataaaccggcgcatttcattctgatcttcgataacggctacttctcagagtttggcaccttctctattactgactggatcggtcacacaccgaaagcgcttctcgccaagaactttggtctgcccgaatcggcttttgacgggtttcccaaggacgaggtctattttgcacgtggcgcgatcccaccagccacccctgcagcgcctttacagggacgcaaattgccaccactcacgcataaatacgaaatgctcgaacaagctcctcataaagttttcaaaggtggtcgtgaatggcgcgtggatagcacccgttttcccatttccaagactgtaaccggcgttgttcttgatttggaacccggcgcgttacgcgagcttcactggcatcctaatgctgacgagtggcaatatgtgatcgatggcaacattagtgtgacgatgttcggttctcatggccgttaccgcaccgaacagatggagaaaggtgatgtcgggtatattccacaggggtatggccacagcatcgaaaatgtgggagatcgtccttgtcgcgtcttgattggctttaacacaggtaactaccaagcgatcgacttatcacagtggattgcaggtaatcccgcggatgttcttgccacgaacttcagcaaacccaccagcctctttgaaaagttcccaaaacaggacgtgtttattgctcctggcaaaggccaaactggccaccatcaccatcaccat

SEQ ID NO: 258 - protein, 369 aa, synthetic construct
  REGION 1..369: note = Variant of oxalate decarboxylase from Gemmata sp. SH-PL17
MGDPTFMNNVPDHLLADKDLPTFKFALEKSKGKVIGKSSGKEATVVQLPISKGIAGVSMTLEPGAMRELHWHATAAEWAFVLTGHVRTTVIDPQGAAETNDFGPGDVWYFPRGHGHMLECLGDKPAHFILIFDNGYFSEFGTFSITDWIGHTPKALLAKNFGLPESAFDGFPKDEVYFARGAIPPATPAAPLQGRKLPPLTHKYEMLEQAPHKVFKGGREWRVDSTRFPISKTVTGVVLDLEPGALRELHWHPNADEWQYVIDGNISVTMFGSHGRYRTEQMEKGDVGYIPQGYGHSIENVGDRPCRVLIGFNTGNYQAIDLSQWIAGNPADVLATNFSKPTSLFEKFPKQDVFIAPGKGQTGHHHHHH

SEQ ID NO: 259 - DNA, 1107 bp, synthetic construct
  misc_feature 1..1107: note = Variant of oxalate decarboxylase from Gemmata sp. SH-PL17
  source 1..1107: mol_type = other DNA
atgggtgatccgacctttatgaataatgtgccagaccatctgctggcggataaagatttgccgacgttcaagtttgccctggaaaagagcaagggcaaagtcattgggaaaagttcgggaaaagaagcaaccgttgttcagttacctatctccaaaggcattgctggtgtgagcatgactcttgaagcgggtgcgatgcgcgaattgcactggcatgccacagcagcagagtgggctttcgtattaaccggccacgtccgtacgacggtgatcgatccacaaggtgcggccgaaaccaacgactttggaccgggcgacgtgtggtattttcctcgcggtcatgggcacatgctggaatgcctgggcgataaaccggcgcatttcattctgatcttcgataacggctacttctcagagtttggcaccttctctattactgactggatcggtcacacaccgaaagcgcttctcgccaagaactttggtctgcccgaatcggcttttgatgggtttcccaaagacgaggtctattttgcacgtggcgcggttccaccagccacccctgcagcgcctttacagggacgcaaattgccaccactcacgcataaatacgaactcctcgaacaagctcctcataaagttttcaaaggtggtcgtgaatggcgcgtggatagcacccgttttcccatttccaagactgtaaccggcgttgttcttgatttggaacccggcgcgttacgcgagcttcactggcatcctaatgctgacgagtggcaatatgtgatcgatggcaacattagtgtgacgatgttcggttctcatggccgttaccgcaccgaacagatggagaaaggtgatgtcgggtatattccacaggggtatggccacagcatcgaaaatgtgggagatcgtccttgtcgcgtcttgattggctttaacacaggtaactaccaagcgatcgacttatcacagtggattgcaggtaatcccgcggatgttcttgccacgaacttctccaaacccaccagcctctttgaaaagttcccaaaacaggacgtgtttattgctcctggcaagggccaaactggccaccatcaccatcaccat

SEQ ID NO: 260 - protein, 369 aa, synthetic construct
  REGION 1..369: note = Variant of oxalate decarboxylase from Gemmata sp. SH-PL17
MGDPTFMNNVPDHLLADKDLPTFKFALEKSKGKVIGKSSGKEATVVQLPISKGIAGVSMTLEAGAMRELHWHATAAEWAFVLTGHVRTTVIDPQGAAETNDFGPGDVWYFPRGHGHMLECLGDKPAHFILIFDNGYFSEFGTFSITDWIGHTPKALLAKNFGLPESAFDGFPKDEVYFARGAVPPATPAAPLQGRKLPPLTHKYELLEQAPHKVFKGGREWRVDSTRFPISKTVTGVVLDLEPGALRELHWHPNADEWQYVIDGNISVTMFGSHGRYRTEQMEKGDVGYIPQGYGHSIENVGDRPCRVLIGFNTGNYQAIDLSQWIAGNPADVLATNFSKPTSLFEKFPKQDVFIAPGKGQTGHHHHHH

SEQ ID NO: 261 - DNA, 1107 bp, synthetic construct
  misc_feature 1..1107: note = Variant of oxalate decarboxylase from Gemmata sp. SH-PL17
  source 1..1107: mol_type = other DNA
atgggtgatccgacctttatgaataatgtgccagaccatctgctggcggataaagatttgccgacgttcaagtttgccctggaaaagagcaagggcaaagtcattgggaaaagttcgggaaaagaagcaaccgttgttcagttacctatctccaaaggcattgctggtgtgagcatgactcttgaaccgggtgcgatgcgcgaattgcactggcatgccacagcagcagagtgggctttcgtattaaccggccacgtccgtacgacggtgatcgatccacaaggtgcggccgaaaccaacgactttggaccgggcgacgtgtggtattttcctcgcggtcatgggcacatgctggaatgcctgggcgataaaccggcgcatttcattctgatcttcgataacggctacttctcagagtttggcaccttctctattactgactggatcggtcacacaccgaaagcgcttctcgccaagaactttggtctgcccgaatcggcttttgacgggtttcccgttgacgaggtctattttgcacgtggcgcggttccaccagccacccctgcagcgcctttacagggacgcaaattgccaccactcacgcataaatacgaactcctcgaacaagctcctcataaagttttcaaaggtggtcgtgaatggcgcgtggatagcacccgttttcccatttccaagactgtaaccggcgttgttcttgatttggaacccggcgcgttacgcgagcttcactggcatcctaatgctgacgagtggcaatatgtgatcgatggcaacattagtgtgacgatgttcggttctcatggccgttaccgcaccgaacagatggagaaaggtgatgtcgggtatattccacaggggtatggccacagcatcgaaaatgtgggagatcgtccttgtcgcgtcttgattggctttaacacaggtaactaccaagcgatcgacttatcacagtggattgcaggtaatcccgcggatgttcttgccacgaacttcagcaaacccaccagcctctttgaacgtttcccaaaacaggacgtgtttattgctcctggcaagggccaaactggccaccatcaccatcaccat

SEQ ID NO: 262 - protein, 369 aa, synthetic construct
  REGION 1..369: note = Variant of oxalate decarboxylase from Gemmata sp. SH-PL17
MGDPTFMNNVPDHLLADKDLPTFKFALEKSKGKVIGKSSGKEATVVQLPISKGIAGVSMTLEPGAMRELHWHATAAEWAFVLTGHVRTTVIDPQGAAETNDFGPGDVWYFPRGHGHMLECLGDKPAHFILIFDNGYFSEFGTFSITDWIGHTPKALLAKNFGLPESAFDGFPVDEVYFARGAVPPATPAAPLQGRKLPPLTHKYELLEQAPHKVFKGGREWRVDSTRFPISKTVTGVVLDLEPGALRELHWHPNADEWQYVIDGNISVTMFGSHGRYRTEQMEKGDVGYIPQGYGHSIENVGDRPCRVLIGFNTGNYQAIDLSQWIAGNPADVLATNFSKPTSLFERFPKQDVFIAPGKGQTGHHHHHH

SEQ ID NO: 263 - DNA, 1107 bp, synthetic construct
  misc_feature 1..1107: note = Variant of oxalate decarboxylase from Gemmata sp. SH-PL17
  source 1..1107: mol_type = other DNA
atgggtgatccgacctttatgaataatgtgccagaccatctgctgtcggataaagatttgccgacgttcaagtttgaactggaaaagagcaagggcaaagtcattgggaaaagttcgggaaaagaagcaaccgttgttcagttacctatctccaaaggcattgctggtgtgagcatgactcttgaaccgggtgcgatgcgcgaattgcactggcatgccacagcagcagagtgggctttcgtattaaccggccacgtccgtacgacggtgatcgatccacaaggtgcggccgaaaccaacgactttggaccgggcgacgtgtggtattttcctcgcggtcatgggcacatgctggaatgcctgggcgataaaccggcgcatttcattctgatcttcgataacggctacttctcagagtttggcaccttctctattactgactggatcggtcacacaccgaaagcgcttctcgccaagaactttggtctgcccgaatcggcttttgatgggtttcccaaaaaagaggtctattttgcacgtggcgcggttccaccagccacccctgcagcgcctttacagggacgtgtattgccaccactcacgcataaatacgaactcctcgaacaagctcctcataaagttttcaaaggtggtcgtgaatggcgcgtggatagcacccgttttcccatttccaagactgtaaccggcgttgttcttgatttggaacccggcgcgttacgcgagcttcactggcatcctaatgctgacgagtggcaatatgtgatcgatggcaacattagtgtgacgatgttcggttctcatggccgttaccgcaccgaacagatggagaagggtgatgtcgggtatattccacaggggtatggccacagcatcgaaaatgtgggagatcgtccttgtcgcgtcttgattggctttaacacaggtaactaccaagcgatcgacttatcacagtggattgcaggtaatcccgcggatgttcttgccacgaacttctccaaacccaccagcctctttgaaaagttcccaaaacaggacgtgtttattgctcctggcaagggccaaactggccaccatcaccatcaccat

SEQ ID NO: 264 - protein, 369 aa, synthetic construct
  REGION 1..369: note = Variant of oxalate decarboxylase from Gemmata sp. SH-PL17
MGDPTFMNNVPDHLLSDKDLPTFKFELEKSKGKVIGKSSGKEATVVQLPISKGIAGVSMTLEPGAMRELHWHATAAEWAFVLTGHVRTTVIDPQGAAETNDFGPGDVWYFPRGHGHMLECLGDKPAHFILIFDNGYFSEFGTFSITDWIGHTPKALLAKNFGLPESAFDGFPKKEVYFARGAVPPATPAAPLQGRVLPPLTHKYELLEQAPHKVFKGGREWRVDSTRFPISKTVTGVVLDLEPGALRELHWHPNADEWQYVIDGNISVTMFGSHGRYRTEQMEKGDVGYIPQGYGHSIENVGDRPCRVLIGFNTGNYQAIDLSQWIAGNPADVLATNFSKPTSLFEKFPKQDVFIAPGKGQTGHHHHHH

SEQ ID NO: 265 - DNA, 1107 bp, synthetic construct
  misc_feature 1..1107: note = Variant of oxalate decarboxylase from Gemmata sp. SH-PL17
  source 1..1107: mol_type = other DNA
atgggtgatccgacctttatgaataatgtgccagaccatctgctgtcggataaagatttgccgacgttcaagtttgcactggaaaagagcaagggcaaagtcattgggaaaagttcgggaaaagaagcaaccgttgttcagttacctatctccaaaggcattgctggtgtgagcatgactcttgaaccgggtgcgatgcgcgaattgcactggcatgccacagcagcagagtgggctttcgtattaaccggccacgtccgtacgacggtgatcgatccacaaggtgcggccgaaaccaacgactttggaccgggcgacgtgtggtattttcctcgcggtcatgggcacatgctggaatgcctgggcgataaaccggcgcatttcattctgatcttcgataacggctacttctcagagtttggcaccttctctattactgactggatcggtcacacaccgaaagcgcttctcgccaagaactttggtctgcccgaatcggcttttgatgggtttcccaaagacgaggtctattttgcacgtggcgcggttccaccagccacccctgcagcgcctttacagggacgtaagttgccaccactcacgcataaatacgaactcctcgaacaagctcctcataaagttttcaaaggtggtcgtgaatggcgcgtggatagcacccgttttcccatttccaagactgtaaccggcgttgttcttgatttggaacccggcgcgttacgcgagcttcactggcatcctaatgctgacgagtggcaatatgtgatcgatggcaacattagtgtgacgatgttcggttctcatggccgttaccgcaccgaacagatggaggcgggtgatgtcgggtatattccacaggggtatggccacagcatcgaaaatgtgggagatcgtccttgtcgcgtcttgattggctttaacacaggtaactaccaagcgatcgacttatcacagtggattgcaggtaatcccgcggatgttcttgccacgaacttctccaaacccaccagcctctttgaaaagttcccaaaacaggacgtgtttattgctcctggcaagggccaaactggccaccatcaccatcaccat

SEQ ID NO: 266 - protein, 369 aa, synthetic construct
  REGION 1..369: note = Variant of oxalate decarboxylase from Gemmata sp. SH-PL17
MGDPTFMNNVPDHLLSDKDLPTFKFALEKSKGKVIGKSSGKEATVVQLPISKGIAGVSMTLEPGAMRELHWHATAAEWAFVLTGHVRTTVIDPQGAAETNDFGPGDVWYFPRGHGHMLECLGDKPAHFILIFDNGYFSEFGTFSITDWIGHTPKALLAKNFGLPESAFDGFPKDEVYFARGAVPPATPAAPLQGRKLPPLTHKYELLEQAPHKVFKGGREWRVDSTRFPISKTVTGVVLDLEPGALRELHWHPNADEWQYVIDGNISVTMFGSHGRYRTEQMEAGDVGYIPQGYGHSIENVGDRPCRVLIGFNTGNYQAIDLSQWIAGNPADVLATNFSKPTSLFEKFPKQDVFIAPGKGQTGHHHHHH

SEQ ID NO: 267 - DNA, 1107 bp, synthetic construct
  misc_feature 1..1107: note = Variant of oxalate decarboxylase from Gemmata sp. SH-PL17
  source 1..1107: mol_type = other DNA
atgggtgatccgacctttatgaataatgtgccagaccatctgctggcggataaagatttgccgacgttcaagtttgccctggaaaagagcaagggcaaagtcattgggaaaagttcgggaaaagaagcaaccgttgttcagttacctatctccaaaggcattgctggtgtgagcatgaggcttgaaccgggtgcgatgcgcgaattgcactggcatgccacagcagcagagtgggctttcgtattaaccggccacgtccgtacgacggtgatcgatccacaaggtgcggccgaaaccaacgactttggaccgggcgacgtgtggtattttcctcgcggtcatgggcacatgctggaatgcctgggcgataaaccggcgcatttcattctgatcttcgataacggctacttctcagagtttggcaccttctctattactgactggatcggtcacacaccgaaagcgcttctcgccaagaactttggtctgcccgaatcggcttttgatgggtttcccaaagacgaggtctattttgcacgtggcgcggttccaccagccacccctgcagcgcctttacagggacgcaaattgccaccactcacgcataaatacgaactcctcgaacaagctcctcataaagttttcaaaggtggtcgtgaatggcgcgtggatagcacccgttttcccatttccaagactgtaaccggcgttgttcttgatttggaacccggcgcgttacgcgagcttcactggcatcctaatgctgacgagtggcaatatgtgatcgatggcaacattagtgtgacgatgttcggttctcatggccgttaccgcaccgaacagatggagaaaggtgatgtcgggtatattccacaggggtatggccacagcatcgaaaatgtgggagatcgtccttgtcgcgtcttgattggctttaacacaggtaactaccaagcgatcgacttatcacagtggattgcaggtaatcccgcggatgttcttgccacgaacttctccaaacccaccagcctctttgaaaagttcccaaaacaggacgtgtttattgctcctggcaagggccaaactggccaccatcaccatcaccat

SEQ ID NO: 268 - protein, 369 aa, synthetic construct
  REGION 1..369: note = Variant of oxalate decarboxylase from Gemmata sp. SH-PL17
MGDPTFMNNVPDHLLADKDLPTFKFALEKSKGKVIGKSSGKEATVVQLPISKGIAGVSMRLEPGAMRELHWHATAAEWAFVLTGHVRTTVIDPQGAAETNDFGPGDVWYFPRGHGHMLECLGDKPAHFILIFDNGYFSEFGTFSITDWIGHTPKALLAKNFGLPESAFDGFPKDEVYFARGAVPPATPAAPLQGRKLPPLTHKYELLEQAPHKVFKGGREWRVDSTRFPISKTVTGVVLDLEPGALRELHWHPNADEWQYVIDGNISVTMFGSHGRYRTEQMEKGDVGYIPQGYGHSIENVGDRPCRVLIGFNTGNYQAIDLSQWIAGNPADVLATNFSKPTSLFEKFPKQDVFIAPGKGQTGHHHHHH

SEQ ID NO: 269 - DNA, 1107 bp, synthetic construct
  misc_feature 1..1107: note = Variant of oxalate decarboxylase from Gemmata sp. SH-PL17
  source 1..1107: mol_type = other DNA
atgggtgatccgacctttatgaataatgtgccagaccatctgctggcggataaagatttgccgacgttcaagtttgccctggaaaagagcaagggcaaagtcattgggaaaagttcgggaaaagaagcaaccgttaggcagttacctatctccaaaggcattgctggtgtgagcatgactcttgaaccgggtgcgatgcgcgaattgcactggcatgccacagcagcagagtgggctttcgtattaaccggccacgtccgtacgacggtgatcgatccacaaggtgcggccgaaaccaacgactttggaccgggcgacgtgtggtattttcctcgcggtcatgggcacatgctggaatgcctgggcgataaaccggcgcatttcattctgatcttcgataacggctacttctcagagtttggcaccttctctattactgactggatcggtcacacaccgaaagcgcttctcgccaagaactttggtctgcccgaatcggcttttgatgggtttcccaaagacgaggtctattttgcacgtggcgcggttccaccagccacccctgcagcgcctttacagggacgcaaattgccaccactcacgcataaatacgaactcctcgaacaagctcctcataaagttttcaaaggtggtcgtgaatggcgcgtggatagcacccgttttcccatttccaagactgtaaccggcgttgttcttgatttggaacccggcgcgttacgcgagcttcactggcatcctaatgctgacgagtggcaatatgtgatcgatggcaacattagtgtgacgatgttcggttctcatggccgttaccgcaccgaacagatggagaaaggtgatgtcgggtatattccacaggggtatggccacagcatcgaaaatgtgggagatcgtccttgtcgcgtcttgattggctttaacacaggtaactaccaagcgatcgacttatcacagtggattgcaggtaatcccgcggatgttcttgccacgaacttctccaaacccaccagcctctttgaaaagttcccaaaacaggacgtgtttattgctcctggcaagggccaaactggccaccatcaccatcaccat

SEQ ID NO: 270 - protein, 369 aa, synthetic construct
  REGION 1..369: note = Variant of oxalate decarboxylase from Gemmata sp. SH-PL17
MGDPTFMNNVPDHLLADKDLPTFKFALEKSKGKVIGKSSGKEATVRQLPISKGIAGVSMTLEPGAMRELHWHATAAEWAFVLTGHVRTTVIDPQGAAETNDFGPGDVWYFPRGHGHMLECLGDKPAHFILIFDNGYFSEFGTFSITDWIGHTPKALLAKNFGLPESAFDGFPKDEVYFARGAVPPATPAAPLQGRKLPPLTHKYELLEQAPHKVFKGGREWRVDSTRFPISKTVTGVVLDLEPGALRELHWHPNADEWQYVIDGNISVTMFGSHGRYRTEQMEKGDVGYIPQGYGHSIENVGDRPCRVLIGFNTGNYQAIDLSQWIAGNPADVLATNFSKPTSLFEKFPKQDVFIAPGKGQTGHHHHHH

SEQ ID NO: 271 - DNA, 1107 bp, synthetic construct
  misc_feature 1..1107: note = Variant of oxalate decarboxylase from Gemmata sp. SH-PL17
  source 1..1107: mol_type = other DNA
atgggtgatccgacctttatgaataatgtgccagaccatctgctgtcggataaagatttgccgacgttcaagtttgcactggaaaagagcaagggcaaagtcattgggaaaagttcgggaaaagaagcaaccgttgttcagttacctatctccaaaggcattgctggtgtgagcatgactcttgaaccgggtgcgatgcgcgaattgcactggcatgccacagcagcagagtgggctttcgtattaaccggccacgtccgtacgacggtgatcgatccacaaggtgcggccgaaaccaacgactttggaccgggcgacgtgtggtattttcctcgcggtcatgggcacatgctggaatgcctgggcgatgcaccggcgcatttcattctgatcttcgataacggctacttctcagagtttggcaccttctctattactgactggatcggtcacacaccgaaagcgcttctcgccaagaactttggtctgcccgaatcggcttttgatgggtttcccaaagacgaggtctattttgcacgtggcgcggttccaccagccacccctgcagcgcctttacagggactggtattgccaccactcacgcataaatacgaactcctcgaacaagctcctcataaagttttcaaaggtggtcgtgaatggcgcgtggatagcacccgttttcccatttccaagactgtaaccggcgttgttcttgatttggaacccggcgcgttacgcgagcttcactggcatcctaatgctgacgagtggcaatatgtgatcgatggcaacattagtgtgacgatgttcggttctcatggccgttaccgcaccgaacagatggagaagggtgatgtcgggtatattccacaggggtatggccacagcatcgaaaatgtgggagatcgtccttgtcgcgtcttgattggctttaacacaggtaactaccaagcgatcgacttatcacagtggattgcaggtaatcccgcggatgttcttgccacgaacttctccaaacccaccagcctctttgaaaagttcccaaaacaggacgtgtttattgctcctggcaagggccaaactggccaccatcaccatcaccat

SEQ ID NO: 272 - protein, 369 aa, synthetic construct
  REGION 1..369: note = Variant of oxalate decarboxylase from Gemmata sp. SH-PL17
MGDPTFMNNVPDHLLSDKDLPTFKFALEKSKGKVIGKSSGKEATVVQLPISKGIAGVSMTLEPGAMRELHWHATAAEWAFVLTGHVRTTVIDPQGAAETNDFGPGDVWYFPRGHGHMLECLGDAPAHFILIFDNGYFSEFGTFSITDWIGHTPKALLAKNFGLPESAFDGFPKDEVYFARGAVPPATPAAPLQGLVLPPLTHKYELLEQAPHKVFKGGREWRVDSTRFPISKTVTGVVLDLEPGALRELHWHPNADEWQYVIDGNISVTMFGSHGRYRTEQMEKGDVGYIPQGYGHSIENVGDRPCRVLIGFNTGNYQAIDLSQWIAGNPADVLATNFSKPTSLFEKFPKQDVFIAPGKGQTGHHHHHH

SEQ ID NO: 273 - DNA, 1107 bp, synthetic construct
  misc_feature 1..1107: note = Variant of oxalate decarboxylase from Gemmata sp. SH-PL17
  source 1..1107: mol_type = other DNA
atgggtgatccgacctttatgaataatgtgccagaccatctgctggcggataaagatttgccgacgttcaagtttgccctggaaaagagcaagggcaaagtcattgggaaaagttcgggaaaagaagcaaccgttgttcagttacctatctccaaaggcattgctggtgtgagcatgactcttgaaccgggtgcgatgcgcgaattgcactggcatgccacagcagcagagtgggctttcgtattaaccggccacgtccgtacgacggtgatcgatccacaaggtgcggccgaaaccaacgactttggaccgggcgacgtgtggtattttcctcgcggtcatgggcacatgctggaatgcctgggcgataaaccggcgcatttcattctgatcttcgataacggctacttctcagagtttggcaccttctctattactgactggatcggtcacacaccgaaagcgcttctcgccaagaactttggtctgcccgaatcggcttttgatgggtttcccaaagacgaggtctattttgcacgtggcgcggttccaccagccacccctgcagcgcctttacagggacgcaaattgccaccactcacgcataaatacgaactcctcgaacaagctcctcataaagttttcaaaggtggtcgtgaatggcgcgtggatagcacccgttttcccatttccaagactgtaaccggcgttgttcttgatttggaacccggcgcgttacgcgagcttcactggcatcctaatgctgacgagtggcaatatgtgatcgatggcaacattagtgtgacgatgttcggttctagtggccgttaccgcaccgaacagatggagaaaggtgatgtcgggtatattccacaggggtatggccacagcatcgaaaatgtgggagatcgtccttgtcgcgtcttgattggctttaacacaggtaactaccaagcgatcgacttatcacagtggattgcaggtaatcccgcggatgttcttgccacgaacttctccaaacccaccagcctctttgaaaagttcccaaaacaggacgtgtttattgctcctggcaagggccaaactggccaccatcaccatcaccat

SEQ ID NO: 274 - protein, 369 aa, synthetic construct
  REGION 1..369: note = Variant of oxalate decarboxylase from Gemmata sp. SH-PL17
MGDPTFMNNVPDHLLADKDLPTFKFALEKSKGKVIGKSSGKEATVVQLPISKGIAGVSMTLEPGAMRELHWHATAAEWAFVLTGHVRTTVIDPQGAAETNDFGPGDVWYFPRGHGHMLECLGDKPAHFILIFDNGYFSEFGTFSITDWIGHTPKALLAKNFGLPESAFDGFPKDEVYFARGAVPPATPAAPLQGRKLPPLTHKYELLEQAPHKVFKGGREWRVDSTRFPISKTVTGVVLDLEPGALRELHWHPNADEWQYVIDGNISVTMFGSSGRYRTEQMEKGDVGYIPQGYGHSIENVGDRPCRVLIGFNTGNYQAIDLSQWIAGNPADVLATNFSKPTSLFEKFPKQDVFIAPGKGQTGHHHHHH

SEQ ID NO: 275 - DNA, 1107 bp, synthetic construct
  misc_feature 1..1107: note = Variant of oxalate decarboxylase from Gemmata sp. SH-PL17
  source 1..1107: mol_type = other DNA
atgggtgatccgacctttatgaataatgtgccagaccatctgctggcggataaagatttgccgacgttcaagtttgccctggaaaagagcaagggcaaagtcattgggaaaagttcgggaaaagaagcaaccgttgttcagttacctatctccaaaggcattgctggtgtgagcatgactcttgaaccgggtgcgatgcgcgaattgcactggcatgccacagcagcagagtgggctttcgtattaaccggccacgtccgtacgacggtgatcgatccacaaggtgcggccgaaaccaacgactttggaccgggcgacgtgtggtattttcctcgcggtcatgggcacatgctggaatgcctgggcgataaaccggcgcatttcattctgatcttcgataacggctacttctcagagtttggcaccttctctattactgactggatcggtcacacaccgaaagcgcttctcgccaagaactttggtctgcccgaatcggcttttgatgggtttcccaaagacgaggtctattttgcacgtggcgcggttccaccagccacccctgcagcgcctttacagggacgcaaattgccaccactcacgcataaatacgaactcctcgaacaagctcctcataaagttttcaaaggtggtcgtgaatggcgcgtggatagcacccgttttcccatttccaagactgtaaccggcgttgttcttgatttggaacccggcgcgttacgcgagcttcactggcatcctaatgctgacgagtggcaatatgtgatcgatggcaacattagtgtgacgatgttcggttctcatggccgttaccgcaccgaacagatggagaaaggtgatgtcgggtatattccacaggggtatggccacagcatcgaaaatgtgggagatcgtccttgtcgcgtcttgattggctttaacacaggtaactaccaagcgatcgacttatcacagtggattgcaggtaatcccattgatgttcttgccacgaacttctccaaacccaccagcctctttgaaaagttcccaaaacaggacgtgtttattgctcctggcaagggccaaactggccaccatcaccatcaccat

SEQ ID NO: 276 - protein, 369 aa, synthetic construct
  REGION 1..369: note = Variant of oxalate decarboxylase from Gemmata sp. SH-PL17
MGDPTFMNNVPDHLLADKDLPTFKFALEKSKGKVIGKSSGKEATVVQLPISKGIAGVSMTLEPGAMRELHWHATAAEWAFVLTGHVRTTVIDPQGAAETNDFGPGDVWYFPRGHGHMLECLGDKPAHFILIFDNGYFSEFGTFSITDWIGHTPKALLAKNFGLPESAFDGFPKDEVYFARGAVPPATPAAPLQGRKLPPLTHKYELLEQAPHKVFKGGREWRVDSTRFPISKTVTGVVLDLEPGALRELHWHPNADEWQYVIDGNISVTMFGSHGRYRTEQMEKGDVGYIPQGYGHSIENVGDRPCRVLIGFNTGNYQAIDLSQWIAGNPIDVLATNFSKPTSLFEKFPKQDVFIAPGKGQTGHHHHHH

SEQ ID NO: 277 - DNA, 1107 bp, synthetic construct
  misc_feature 1..1107: note = Variant of oxalate decarboxylase from Gemmata sp. SH-PL17
  source 1..1107: mol_type = other DNA
atgggtgatccgacctttatgaataatgtgccagaccatctgctggcggataaagatttgccgacgttcaagtttgcactggaaaagagcaagggcaaagtcattgggaaaagttcgggaaaagaagcaaccgttgttcagttacctatctccaaaggcattgctggtgtgagcatgactcttgaaccgggtgcgatgcgcgaattgcactggcatgccacagcagcagagtgggctttcgtattaaccggccacgtccgtacgacggtgatcgatccacaaggtgcggccgaaaccaacgactttggaccgggcgacgtgtggtattttcctcgcggtcatgggcacatgctggaatgcctgggcgataaaccggcgcatttcattctgatcttcgataacggctacttctcagagtttggcaccttctctattactgactggatcggtcacacaccgaaagcgcttctcgccaagaactttggtctgcccgaatcggcttttgatgggtttcccaaaaaagaggtctattttgcacgtggcgcggttccaccagccacccctgcagcgcctttacagggacgtgtattgccaccactcacgcataaatacgaactcctcgaacaagcacctcataaagttttcaaaggtggtcgtgaatggcgcgtggatagcacgcgttttcccatttccaagactgtaaccggcgttgttcttgatttggaacccggcgcgttacgcgagcttcactggcatcctaatgctgacgagtggcaatatgtgatcgatggcaacattagtgtgacgatgttcggttctcatggccgttaccgcaccgaacagatggagaagggtgatgtcgggtatattccacaggggtatggccacagcatcgaaaatgtgggagatcgtccttgtcgcgtcttgattggctttaacacaggtaactaccaagcgatcgacttatcacagtggattgcaggtaatcccgcggatgttcttgccacgaacttctccaaacccaccagcctctttgaaaagttcccaaaacaggacgtgtttattgctcctggcaagggccaaactggccaccatcaccatcaccat

SEQ ID NO: 278 - protein, 369 aa, synthetic construct
  REGION 1..369: note = Variant of oxalate decarboxylase from Gemmata sp. SH-PL17
MGDPTFMNNVPDHLLADKDLPTFKFALEKSKGKVIGKSSGKEATVVQLPISKGIAGVSMTLEPGAMRELHWHATAAEWAFVLTGHVRTTVIDPQGAAETNDFGPGDVWYFPRGHGHMLECLGDKPAHFILIFDNGYFSEFGTFSITDWIGHTPKALLAKNFGLPESAFDGFPKKEVYFARGAVPPATPAAPLQGRVLPPLTHKYELLEQAPHKVFKGGREWRVDSTRFPISKTVTGVVLDLEPGALRELHWHPNADEWQYVIDGNISVTMFGSHGRYRTEQMEKGDVGYIPQGYGHSIENVGDRPCRVLIGFNTGNYQAIDLSQWIAGNPADVLATNFSKPTSLFEKFPKQDVFIAPGKGQTGHHHHHH

SEQ ID NO: 279 - DNA, 1107 bp, synthetic construct
  misc_feature 1..1107: note = Variant of oxalate decarboxylase from Gemmata sp. SH-PL17
  source 1..1107: mol_type = other DNA
atgggtgatccgacctttatgaataatgtgccagaccatctgctggcggataaagatttgccgacgttcaagtttgcactggaaaagagcaagggcaaagtcattgggaaaagttcgggaaaagaagcaaccgttgttcagttacctatctccaaaggcattgctggtgtgagcatgactcttgaaccgggtgcgatgcgcgaattgcactggcatgccacagcagcagagtgggctttcgtattaaccggccacgtccgtacgacggtgatcgatccacaaggtgcggccgaaaccaacgactttggaccgggcgacgtgtggtattttcctcgcggtcatgggcacatgctggaatgcctgggcgataaaccggcgcatttcattctgatcttcgataacggctacttctcagagtttggcaccttctctattactgactggatcggtcacacaccgaaaccgcttctcgccaagaactttggtctgcccgaatcggcttttgatgggtttcccaaaaaagaggtctattttgcacgtggcgcggttccaccagccacccctgcagcgcctttacagggacgtgtattgccaccactcacgcataaatacgaactcctcgaacaagctcctcataaagttttcaaaggtggtcgtgaatggcgcgtggatagcacccgttttcccatttccaagactgtaaccggcgttgttcttgatttggaacccggcgcgttacgcgagcttcactggcatcctaatgctgacgagtggcaatatgtgatcgatggcaacattagtgtgacgatgttcggttctcatggccgttaccgcaccgaacagatggagaagggtgatgtcgggtatattccacaggggtatggccacagcatcgaaaatgtgggagatcgtccttgtcgcgtcttgattggctttaacacaggtaactaccaagcgatcgacttatcacagtggattgcaggtaatcccgcggatgttcttgccacgaacttctccaaacccaccagcctctttgaaaagttcccaaaacaggacgtgtttattgctcctggcaagggccaaactggccaccatcaccatcaccat

SEQ ID NO: 280 - protein, 369 aa, synthetic construct
  REGION 1..369: note = Variant of oxalate decarboxylase from Gemmata sp. SH-PL17
MGDPTFMNNVPDHLLADKDLPTFKFALEKSKGKVIGKSSGKEATVVQLPISKGIAGVSMTLEPGAMRELHWHATAAEWAFVLTGHVRTTVIDPQGAAETNDFGPGDVWYFPRGHGHMLECLGDKPAHFILIFDNGYFSEFGTFSITDWIGHTPKPLLAKNFGLPESAFDGFPKKEVYFARGAVPPATPAAPLQGRVLPPLTHKYELLEQAPHKVFKGGREWRVDSTRFPISKTVTGVVLDLEPGALRELHWHPNADEWQYVIDGNISVTMFGSHGRYRTEQMEKGDVGYIPQGYGHSIENVGDRPCRVLIGFNTGNYQAIDLSQWIAGNPADVLATNFSKPTSLFEKFPKQDVFIAPGKGQTGHHHHHH

SEQ ID NO: 281 - DNA, 1107 bp, synthetic construct
  misc_feature 1..1107: note = Variant of oxalate decarboxylase from Gemmata sp. SH-PL17
  source 1..1107: mol_type = other DNA
atgggtgatccgacctttatgaataatgtgccagaccatctgctggcggataaagatttgccgacgttcaagtttgcactggaaaagagcaagggcaaagtcattgggaaaagttcgggaaaagaagcaaccgttgttcagttacctatctccaaaggcattgctggtgtgagcatgactcttgaaccgggtgcgatgcgcgaattgcactggcatgccacagcagcagagtgggctttcgtattaaccggccacgtccgtacgacggtgatcgatccacaaggtgcggccgaaaccaacgactttggaccgggcgacgtgtggtattttcctcgcggtcatgggcacatgctggaatgcctgggcgataaaccggcgcatttcattctgatcttcgataacggctacttctcagagtttggcaccttctctattactgactggatcggtcacacaccgaaagcgcttctcgccaagaactttggtctgcccgaatcggcttttgatgggtttcccaaaaaagaggtctattttgcacgtggcgcggttccaccagccacccctgcagcgcctttacagggacgtgtattgccaccactcacgcataaatacgaactcctcgaacaagcacctcataaagttttcaaaggtggtcgtgaatggcgcgtggatagctcgcgttttcccatttccaagactgtaaccggcgttgttcttgatttggaacccggcgcgttacgcgagcttcactggcatcctaatgctgacgagtggcaatatgtgatcgatggcaacattagtgtgacgatgttcggttctcatggccgttaccgcaccgaacagatggagaagggtgatgtcgggtatattccacaggggtatggccacagcatcgaaaatgtgggagatcgtccttgtcgcgtcttgattggctttaacacaggtaactaccaagcgatcgacttatcacagtggattgcaggtaatcccgcggatgttcttgccacgaacttctccaaacccaccagcctctttgaaaagttcccaaaacaggacgtgtttattgctcctggcaagggccaaactggccaccatcaccatcaccat

SEQ ID NO: 282 - protein, 369 aa, synthetic construct
  REGION 1..369: note = Variant of oxalate decarboxylase from Gemmata sp. SH-PL17
MGDPTFMNNVPDHLLADKDLPTFKFALEKSKGKVIGKSSGKEATVVQLPISKGIAGVSMTLEPGAMRELHWHATAAEWAFVLTGHVRTTVIDPQGAAETNDFGPGDVWYFPRGHGHMLECLGDKPAHFILIFDNGYFSEFGTFSITDWIGHTPKALLAKNFGLPESAFDGFPKKEVYFARGAVPPATPAAPLQGRVLPPLTHKYELLEQAPHKVFKGGREWRVDSSRFPISKTVTGVVLDLEPGALRELHWHPNADEWQYVIDGNISVTMFGSHGRYRTEQMEKGDVGYIPQGYGHSIENVGDRPCRVLIGFNTGNYQAIDLSQWIAGNPADVLATNFSKPTSLFEKFPKQDVFIAPGKGQTGHHHHHH

SEQ ID NO: 283 - DNA, 1107 bp, synthetic construct
  misc_feature 1..1107: note = Variant of oxalate decarboxylase from Gemmata sp. SH-PL17
  source 1..1107: mol_type = other DNA
atgggtgatccgacctttatgaataatgtgccagaccatctgctggcggataaagatttgccgacgttcaagtttgccctggaaaagagcaagggcaaagtcattgggaaaagttcgggaaaagaagcaaccgttgttcagttacctatctccaaaggcattgctggtgtgagcatgactcttgaaccgggtgcgatgcgcgaattgcactggcatgccacagcagcagagtgggctttcgtattaaccggccacgtccgtacgacggtgatcgatccacaaggtgcggccgaaaccaacgactttggaccgggcgacgtgtggtattttcctcgcggtcatgggcacatgctggaatgcctgggcgataaaccggcgcatttcattctgatcttcgataacggctacttctcagagtttggcaccttctctattactgactggatcggtcacacaccgaaagcgcttctcgccaagaactttggtctgcccgaatcggcttttgatgggtttcccaaagacgaggtctattttgcacgtggcgcggttccaccagccacccctgcagcgcctttacagggacgcaaattgccaccactcacgcataaatacgaactcctcgaacaagctcctcataaagttttcaaaggtggtcgtgaatggcgcgtggatagcacccgttttcccatttccaagactgtaaccggcgttgttcttgatttggaacccggcgcgttacgcgagcttcactggcatcctaatgctgacgagtggcaatatgtgatcgatggcaacattagtgtgacgatgttcggttctcatggccgttaccgcaccgaacagatggagaaaggtgatgtcgggtatattccacaggggtatggccacagcatcgaaaatgtgggagatcgtccttgtcgcgtcttgattggctttaacacaggtaactaccaagcgatcgacttatcacagtggattgcaggtaatcccttggatgttcttgccacgaacttctccaaacccaccagcctctttgaaaagttcccaaaacaggacgtgtttattgctcctggcaagggccaaactggccaccatcaccatcaccat

SEQ ID NO: 284 - protein, 369 aa, synthetic construct
  REGION 1..369: note = Variant of oxalate decarboxylase from Gemmata sp. SH-PL17
MGDPTFMNNVPDHLLADKDLPTFKFALEKSKGKVIGKSSGKEATVVQLPISKGIAGVSMTLEPGAMRELHWHATAAEWAFVLTGHVRTTVIDPQGAAETNDFGPGDVWYFPRGHGHMLECLGDKPAHFILIFDNGYFSEFGTFSITDWIGHTPKALLAKNFGLPESAFDGFPKDEVYFARGAVPPATPAAPLQGRKLPPLTHKYELLEQAPHKVFKGGREWRVDSTRFPISKTVTGVVLDLEPGALRELHWHPNADEWQYVIDGNISVTMFGSHGRYRTEQMEKGDVGYIPQGYGHSIENVGDRPCRVLIGFNTGNYQAIDLSQWIAGNPLDVLATNFSKPTSLFEKFPKQDVFIAPGKGQTGHHHHHH

SEQ ID NO: 285 - DNA, 1107 bp, synthetic construct
  misc_feature 1..1107: note = Variant of oxalate decarboxylase from Gemmata sp. SH-PL17
  source 1..1107: mol_type = other DNA
atgggtgatccgacctttatgaataatgtgccagaccatctgctgtcggataaagatttgccgacgttcaagtttgcactggaaaagagcaagggcaaagtcattgggaaaagttcgggaaaagaagcaaccgttgttcagttacctatctccaaaggcattgctggtgtgagcatgactcttgaaccgggtgcgatgcgcgaattgcactggcatgccacagcagcagagtgggctttcgtattaaccggccacgtccgtacgacggtgatcgatccacaaggtgcggccgaaaccaacgactttggaccgggcgacgtgtggtattttcctcgcggtcatgggcacatgctggaatgcctgggcgatgcaccggcgcatttcattctgatcttcgataacggctacttctcagagtttggcaccttctctattactgactggatcggtcacacaccgaaaccgcttctcgccaagaactttggtctgcccgaatcggcttttgatgggtttcccaaaaaagaggtctattttgcacgtggcgcggttccaccagccacccctgcagcgcctttacagggactgaagttgccaccactcacgcataaatacgaactcctcgaacaagcacctcataaagttttcaaaggtggtcgtgaatggcgcgtggatagcacgcgttttcccatttccaagactgtaaccggcgttgttcttgatttggaacccggcgcgttacgcgagcttcactggcatcctaatgctgacgagtggcaatatgtgatcgatggcaacattagtgtgacgatgttcggttctcatggccgttaccgcaccgaacagatggagaagggtgatgtcgggtatattccacaggggtatggccacagcatcgaaaatgtgggagatcgtccttgtcgcgtcttgattggctttaacacaggtaactaccaagcgatcgacttatcacagtggattgcaggtaatcccgcggatgttcttgccacgaacttctccaaacccaccagcctctttgaaaagttcccaaaacaggacgtgtttattgctcctggcaagggccaaactggccaccatcaccatcaccat

SEQ ID NO: 286 - protein, 369 aa, synthetic construct
  REGION 1..369: note = Variant of oxalate decarboxylase from Gemmata sp. SH-PL17
MGDPTFMNNVPDHLLSDKDLPTFKFALEKSKGKVIGKSSGKEATVVQLPISKGIAGVSMTLEPGAMRELHWHATAAEWAFVLTGHVRTTVIDPQGAAETNDFGPGDVWYFPRGHGHMLECLGDAPAHFILIFDNGYFSEFGTFSITDWIGHTPKPLLAKNFGLPESAFDGFPKKEVYFARGAVPPATPAAPLQGLKLPPLTHKYELLEQAPHKVFKGGREWRVDSTRFPISKTVTGVVLDLEPGALRELHWHPNADEWQYVIDGNISVTMFGSHGRYRTEQMEKGDVGYIPQGYGHSIENVGDRPCRVLIGFNTGNYQAIDLSQWIAGNPADVLATNFSKPTSLFEKFPKQDVFIAPGKGQTGHHHHHH

SEQ ID NO: 287 - DNA, 1107 bp, synthetic construct
  misc_feature 1..1107: note = Variant of oxalate decarboxylase from Gemmata sp. SH-PL17
  source 1..1107: mol_type = other DNA
atgggtgatccgacctttatgaataatgtgccagaccatctgctgtcggataaagatttgccgacgttcaagtttgaactggaaaagagcaagggcaaagtcattgggaaaagttcgggaaaagaagcaaccgttgttcagttacctatctccaaaggcattgctggtgtgagcatgactcttgaaccgggtgcgatgcgcgaattgcactggcatgccacagcagcagagtgggctttcgtattaaccggccacgtccgtacgacggtgatcgatccacaaggtgcggccgaaaccaacgactttggaccgggcgacgtgtggtattttcctcgcggtcatgggcacatgctggaatgcctgggcgataaaccggcgcatttcattctgatcttcgataacggctacttctcagagtttggcaccttctctattactgactggatcggtcacacaccgaaaccgcttctcgccaagaactttggtctgcccgaatcggcttttgatgggtttcccaaaaaagaggtctattttgcacgtggcgcggttccaccagccacccctgcagcgcctttacagggacgtgtattgccaccactcacgcataaatacgaactcctcgaacaagctcctcataaagttttcaaaggtggtcgtgaatggcgcgtggatagcacgcgttttcccatttccaagactgtaaccggcgttgttcttgatttggaacccggcgcgttacgcgagcttcactggcatcctaatgctgacgagtggcaatatgtgatcgatggcaacattagtgtgacgatgttcggttctcatggccgttaccgcaccgaacagatggagaagggtgatgtcgggtatattccacaggggtatggccacagcatcgaaaatgtgggagatcgtccttgtcgcgtcttgattggctttaacacaggtaactaccaagcgatcgacttatcacagtggattgcaggtaatcccgcggatgttcttgccacgaacttctccaaacccaccagcctctttgaaaagttcccaaaacaggacgtgtttattgctcctggcaagggccaaactggccaccatcaccatcaccat

SEQ ID NO: 288 - protein, 369 aa, synthetic construct
  REGION 1..369: note = Variant of oxalate decarboxylase from Gemmata sp. SH-PL17
MGDPTFMNNVPDHLLSDKDLPTFKFELEKSKGKVIGKSSGKEATVVQLPISKGIAGVSMTLEPGAMRELHWHATAAEWAFVLTGHVRTTVIDPQGAAETNDFGPGDVWYFPRGHGHMLECLGDKPAHFILIFDNGYFSEFGTFSITDWIGHTPKPLLAKNFGLPESAFDGFPKKEVYFARGAVPPATPAAPLQGRVLPPLTHKYELLEQAPHKVFKGGREWRVDSTRFPISKTVTGVVLDLEPGALRELHWHPNADEWQYVIDGNISVTMFGSHGRYRTEQMEKGDVGYIPQGYGHSIENVGDRPCRVLIGFNTGNYQAIDLSQWIAGNPADVLATNFSKPTSLFEKFPKQDVFIAPGKGQTGHHHHHH

SEQ ID NO: 289 - DNA, 1107 bp, synthetic construct
  misc_feature 1..1107: note = Variant of oxalate decarboxylase from Gemmata sp. SH-PL17
  source 1..1107: mol_type = other DNA
atgggtgatccgacctttatgaataatgtgccagaccatctgctggcggataaagatttgccgacgttcaagtttgaactggaaaagagcaagggcaaagtcattgggaaaagttcgggaaaagaagcaaccgttgttcagttacctatctccaaaggcattgctggtgtgagcatgactcttgaaccgggtgcgatgcgcgaattgcactggcatgccacagcagcagagtgggctttcgtattaaccggccacgtccgtacgacggtgatcgatccacaaggtgcggccgaaaccaacgactttggaccgggcgacgtgtggtattttcctcgcggtcatgggcacatgctggaatgcctgggcgataaaccggcgcatttcattctgatcttcgataacggctacttctcagagtttggcaccttctctattactgactggatcggtcacacaccgaaagcgcttctcgccaagaactttggtctgcccgaatcggcttttgatgggtttcccaaaaaagaggtctattttgcacgtggcgcggttccaccagccacccctgcagcgcctttacagggacgtgtattgccaccactcacgcataaatacgaactcctcgaacaagaacctcataaagttttcaaaggtggtcgtgaatggcgcgtggatagcacccgttttcccatttccaagactgtaaccggcgttgttcttgatttggaacccggcgcgttacgcgagcttcactggcatcctaatgctgacgagtggcaatatgtgatcgatggcaacattagtgtgacgatgttcggttctcatggccgttaccgcaccgaacagatggaggcgggtgatgtcgggtatattccacaggggtatggccacagcatcgaaaatgtgggagatcgtccttgtcgcgtcttgattggctttaacacaggtaactaccaagcgatcgacttatcacagtggattgcaggtaatcccgcggatgttcttgccacgaacttctccaaacccaccagcctctttgaaaagttcccaaaacaggacgtgtttattgctcctggcaagggccaaactggccaccatcaccatcaccat

SEQ ID NO: 290 - protein, 369 aa, synthetic construct
  REGION 1..369: note = Variant of oxalate decarboxylase from Gemmata sp. SH-PL17
MGDPTFMNNVPDHLLADKDLPTFKFELEKSKGKVIGKSSGKEATVVQLPISKGIAGVSMTLEPGAMRELHWHATAAEWAFVLTGHVRTTVIDPQGAAETNDFGPGDVWYFPRGHGHMLECLGDKPAHFILIFDNGYFSEFGTFSITDWIGHTPKALLAKNFGLPESAFDGFPKKEVYFARGAVPPATPAAPLQGRVLPPLTHKYELLEQEPHKVFKGGREWRVDSTRFPISKTVTGVVLDLEPGALRELHWHPNADEWQYVIDGNISVTMFGSHGRYRTEQMEAGDVGYIPQGYGHSIENVGDRPCRVLIGFNTGNYQAIDLSQWIAGNPADVLATNFSKPTSLFEKFPKQDVFIAPGKGQTGHHHHHH

SEQ ID NO: 291 - DNA, 1107 bp, synthetic construct
  misc_feature 1..1107: note = Variant of oxalate decarboxylase from Gemmata sp. SH-PL17
  source 1..1107: mol_type = other DNA
atgggtgatccgacctttatgaataatgtgccagaccatctgctggcggataaagatttgccgacgttcaagtttgccctggaaaagagcaagggcaaagtcattgggaaaagttcgggaaaagaagcaaccgttgttcagttacctatctccaaaggcattgctggtgtgagcatgactcttgaaccgggtgcgatgcgcgaattgcactggcatgccacagcagcagagtgggctttcgtattaaccggccacgtccgtacgacggtgatcgatccacaaggtgcggccgaaaccaacgactttggaccgggcgacgtgtggtattttcctcgcggtcatgggcacatgctggaatgcctgggcgataaaccggcgcatttcattctgatcttcgataacggctacttctcagagtttggcaccttctctattactgactggatcggtcacacaccgaaagcgcttctcgccaagaactttggtctgcccgaatcggcttttgatgggtttcccaaagacgaggtctattttgcacgtggcgcggttccaccagccacccctgcagcgcctttacagggacgcaaattgccaccactcacgcataaatacgaactcctcgaacaagctcctgctaaagttttcaaaggtggtcgtgaatggcgcgtggatagcacccgttttcccatttccaagactgtaaccggcgttgttcttgatttggaacccggcgcgttacgcgagcttcactggcatcctaatgctgacgagtggcaatatgtgatcgatggcaacattagtgtgacgatgttcggttctcatggccgttaccgcaccgaacagatggagaaaggtgatgtcgggtatattccacaggggtatggccacagcatcgaaaatgtgggagatcgtccttgtcgcgtcttgattggctttaacacaggtaactaccaagcgatcgacttatcacagtggattgcaggtaatcccgcggatgttcttgccacgaacttctccaaacccaccagcctctttgaaaagttcccaaaacaggacgtgtttattgctcctggcaagggccaaactggccaccatcaccatcaccat

SEQ ID NO: 292 - protein, 369 aa, synthetic construct
  REGION 1..369: note = Variant of oxalate decarboxylase from Gemmata sp. SH-PL17
MGDPTFMNNVPDHLLADKDLPTFKFALEKSKGKVIGKSSGKEATVVQLPISKGIAGVSMTLEPGAMRELHWHATAAEWAFVLTGHVRTTVIDPQGAAETNDFGPGDVWYFPRGHGHMLECLGDKPAHFILIFDNGYFSEFGTFSITDWIGHTPKALLAKNFGLPESAFDGFPKDEVYFARGAVPPATPAAPLQGRKLPPLTHKYELLEQAPAKVFKGGREWRVDSTRFPISKTVTGVVLDLEPGALRELHWHPNADEWQYVIDGNISVTMFGSHGRYRTEQMEKGDVGYIPQGYGHSIENVGDRPCRVLIGFNTGNYQAIDLSQWIAGNPADVLATNFSKPTSLFEKFPKQDVFIAPGKGQTGHHHHHH

SEQ ID NO: 293 - DNA, 1107 bp, synthetic construct
  misc_feature 1..1107: note = Variant of oxalate decarboxylase from Gemmata sp. SH-PL17
  source 1..1107: mol_type = other DNA
atgggtgatccgacctttatgaataatgtgccagaccatctgctgtcggataaagatttgccgacgttcaagtttgccctggaaaagagcaagggcaaagtcattgggaaaagttcgggaaaagaagcaaccgttgttcagttacctatctccaaaggcattgctggtgtgagcatgactcttgaaccgggtgcgatgcgcgaattgcactggcatgccacagcagcagagtgggctttcgtattaaccggccacgtccgtacgacggtgatcgatccacaaggtgcggccgaaaccaacgactttggaccgggcgacgtgtggtattttcctcgcggtcatgggcacatgctggaatgcctgggcgataaaccggcgcatttcattctgatcttcgataacggctacttctcagagtttggcaccttctctattactgactggatcggtcacacaccgaaagcgcttctcgccaagaactttggtctgcccgaatcggcttttgatgggtttcccaaagacgaggtctattttgcacgtggcgcggttccaccagccacccctgcagcgcctttacagggactggtattgccaccactcacgcataaatacgaactcctcgaacaagctcctcataaagttttcaaaggtggtcgtgaatggcgcgtggatagcacccgttttcccatttccaagactgtaaccggcgttgttcttgatttggaacccggcgcgttacgcgagcttcactggcatcctaatgctgacgagtggcaatatgtgatcgatggcaacattagtgtgacgatgttcggttctcatggccgttaccgcaccgaacagatggaggcgggtgatgtcgggtatattccacaggggtatggccacagcatcgaaaatgtgggagatcgtccttgtcgcgtcttgattggctttaacacaggtaactaccaagcgatcgacttatcacagtggattgcaggtaatcccgcggatgttcttgccacgaacttctccaaacccaccagcctctttgaaaagttcccaaaacaggacgtgtttattgctcctggcaagggccaaactggccaccatcaccatcaccat

SEQ ID NO: 294 - protein, 369 aa, synthetic construct
  REGION 1..369: note = Variant of oxalate decarboxylase from Gemmata sp. SH-PL17
MGDPTFMNNVPDHLLSDKDLPTFKFALEKSKGKVIGKSSGKEATVVQLPISKGIAGVSMTLEPGAMRELHWHATAAEWAFVLTGHVRTTVIDPQGAAETNDFGPGDVWYFPRGHGHMLECLGDKPAHFILIFDNGYFSEFGTFSITDWIGHTPKALLAKNFGLPESAFDGFPKDEVYFARGAVPPATPAAPLQGLVLPPLTHKYELLEQAPHKVFKGGREWRVDSTRFPISKTVTGVVLDLEPGALRELHWHPNADEWQYVIDGNISVTMFGSHGRYRTEQMEAGDVGYIPQGYGHSIENVGDRPCRVLIGFNTGNYQAIDLSQWIAGNPADVLATNFSKPTSLFEKFPKQDVFIAPGKGQTGHHHHHH

SEQ ID NO: 295 - DNA, 1107 bp, synthetic construct
  misc_feature 1..1107: note = Variant of oxalate decarboxylase from Gemmata sp. SH-PL17
  source 1..1107: mol_type = other DNA
atgggtgatccgacctttatgaataatgtgccagaccatctgctggcggataaagatttgccgacgttcaagtttgcactggaaaagagcaagggcaaagtcattgggaaaagttcgggaaaagaagcaaccgttgttcagttacctatctccaaaggcattgctggtgtgagcatgactcttgaaccgggtgcgatgcgcgaattgcactggcatgccacagcagcagagtgggctttcgtattaaccggccacgtccgtacgacggtgatcgatccacaaggtgcggccgaaaccaacgactttggaccgggcgacgtgtggtattttcctcgcggtcatgggcacatgctggaatgcctgggcgataaaccggcgcatttcattctgatcttcgataacggctacttctcagagtttggcaccttctctattactgactggatcggtcacacaccgaaagcgcttctcgccaagaactttggtctgcccgaatcggcttttgatgggtttcccaaaaaagaggtctattttgcacgtggcgcggttccaccagccacccctgcagcgcctttacagggacgtaagttgccaccactcacgcataaatacgaactcctcgaacaagctcctcataaagttttcaaaggtggccgtgaatggcgcgtggatagcacgcgttttcccatttccaagactgtaaccggcgttgttcttgatttggaacccggcgcgttacgcgagcttcactggcatcctaatgctgacgagtggcaatatgtgatcgatggcaacattagtgtgacgatgttcggttctcatggccgttaccgcaccgaacagatggagaagggtgatgtcgggtatattccacaggggtatggccacagcatcgaaaatgtgggagatcgtccttgtcgcgtcttgattggctttaacacaggtaactaccaagcgatcgacttatcacagtggattgcaggtaatcccgcggatgttcttgccacgaacttctccaaacccaccagcctctttgaaaagttcccaaaacaggacgtgtttattgctcctggcaagggccaaactggccaccatcaccatcaccat

SEQ ID NO: 296 - protein, 369 aa, synthetic construct
  REGION 1..369: note = Variant of oxalate decarboxylase from Gemmata sp. SH-PL17
MGDPTFMNNVPDHLLADKDLPTFKFALEKSKGKVIGKSSGKEATVVQLPISKGIAGVSMTLEPGAMRELHWHATAAEWAFVLTGHVRTTVIDPQGAAETNDFGPGDVWYFPRGHGHMLECLGDKPAHFILIFDNGYFSEFGTFSITDWIGHTPKALLAKNFGLPESAFDGFPKKEVYFARGAVPPATPAAPLQGRKLPPLTHKYELLEQAPHKVFKGGREWRVDSTRFPISKTVTGVVLDLEPGALRELHWHPNADEWQYVIDGNISVTMFGSHGRYRTEQMEKGDVGYIPQGYGHSIENVGDRPCRVLIGFNTGNYQAIDLSQWIAGNPADVLATNFSKPTSLFEKFPKQDVFIAPGKGQTGHHHHHH

SEQ ID NO: 297 - DNA, 1107 bp, synthetic construct
  misc_feature 1..1107: note = Variant of oxalate decarboxylase from Gemmata sp. SH-PL17
  source 1..1107: mol_type = other DNA
atgggtgatccgacctttatgaataatgtgccagaccatctgctgtcggataaagatttgccgacgttcaagtttgcactggaaaagagcaagggcaaagtcattgggaaaagttcgggaaaagaagcaaccgttgttcagttacctatctccaaaggcattgctggtgtgagcatgactcttgaaccgggtgcgatgcgcgaattgcactggcatgccacagcagcagagtgggctttcgtattaaccggccacgtccgtacgacggtgatcgatccacaaggtgcggccgaaaccaacgactttggaccgggcgacgtgtggtattttcctcgcggtcatgggcacatgctggaatgcctgggcgatgcaccggcgcatttcattctgatcttcgataacggctacttctcagagtttggcaccttctctattactgactggatcggtcacacaccgaaagcgcttctcgccaagaactttggtctgcccgaatcggcttttgatgggtttcccaaaaaagaggtctattttgcacgtggcgcggttccaccagccacccctgcagcgcctttacagggactgaagttgccaccactcacgcataaatacgaactcctcgaacaagaacctcataaagttttcaaaggtggtcgtgaatggcgcgtggatagctcgcgttttcccatttccaagactgtaaccggcgttgttcttgatttggaacccggcgcgttacgcgagcttcactggcatcctaatgctgacgagtggcaatatgtgatcgatggcaacattagtgtgacgatgttcggttctcatggccgttaccgcaccgaacagatggaggcgggtgatgtcgggtatattccacaggggtatggccacagcatcgaaaatgtgggagatcgtccttgtcgcgtcttgattggctttaacacaggtaactaccaagcgatcgacttatcacagtggattgcaggtaatcccgcggatgttcttgccacgaacttctccaaacccaccagcctctttgaaaagttcccaaaacaggacgtgtttattgctcctggcaagggccaaactggccaccatcaccatcaccat

SEQ ID NO: 298 - protein, 369 aa, synthetic construct
  REGION 1..369: note = Variant of oxalate decarboxylase from Gemmata sp. SH-PL17
MGDPTFMNNVPDHLLSDKDLPTFKFALEKSKGKVIGKSSGKEATVVQLPISKGIAGVSMTLEPGAMRELHWHATAAEWAFVLTGHVRTTVIDPQGAAETNDFGPGDVWYFPRGHGHMLECLGDAPAHFILIFDNGYFSEFGTFSITDWIGHTPKALLAKNFGLPESAFDGFPKKEVYFARGAVPPATPAAPLQGLKLPPLTHKYELLEQEPHKVFKGGREWRVDSSRFPISKTVTGVVLDLEPGALRELHWHPNADEWQYVIDGNISVTMFGSHGRYRTEQMEAGDVGYIPQGYGHSIENVGDRPCRVLIGFNTGNYQAIDLSQWIAGNPADVLATNFSKPTSLFEKFPKQDVFIAPGKGQTGHHHHHH

SEQ ID NO: 299 - DNA, 1107 bp, synthetic construct
  misc_feature 1..1107: note = Variant of oxalate decarboxylase from Gemmata sp. SH-PL17
  source 1..1107: mol_type = other DNA
atgggtgatccgacctttatgaataatgtgccagaccatctgctgtcggataaagatttgccgacgttcaagtttgccctggaaaagagcaagggcaaagtcattgggaaaagttcgggaaaagaagcaaccgttgttcagttacctatctccaaaggcattgctggtgtgagcatgactcttgaaccgggtgcgatgcgcgaattgcactggcatgccacagcagcagagtgggctttcgtattaaccggccacgtccgtacgacggtgatcgatccacaaggtgcggccgaaaccaacgactttggaccgggcgacgtgtggtattttcctcgcggtcatgggcacatgctggaatgcctgggcgataaaccggcgcatttcattctgatcttcgataacggctacttctcagagtttggcaccttctctattactgactggatcggtcacacaccgaaagcgcttctcgccaagaactttggtctgcccgaatcggcttttgatgggtttcccaaaaaagaggtctattttgcacgtggcgcggttccaccagccacccctgcagcgcctttacagggactgaagttgccaccactcacgcataaatacgaactcctcgaacaagcacctcataaagttttcaaaggtggtcgtgaatggcgcgtggatagcacccgttttcccatttccaagactgtaaccggcgttgttcttgatttggaacccggcgcgttacgcgagcttcactggcatcctaatgctgacgagtggcaatatgtgatcgatggcaacattagtgtgacgatgttcggttctcatggccgttaccgcaccgaacagatggaggcgggtgatgtcgggtatattccacaggggtatggccacagcatcgaaaatgtgggagatcgtccttgtcgcgtcttgattggctttaacacaggtaactaccaagcgatcgacttatcacagtggattgcaggtaatcccgcggatgttcttgccacgaacttctccaaacccaccagcctctttgaaaagttcccaaaacaggacgtgtttattgctcctggcaagggccaaactggccaccatcaccatcaccat

SEQ ID NO: 300 - protein, 369 aa, synthetic construct
  REGION 1..369: note = Variant of oxalate decarboxylase from Gemmata sp. SH-PL17
MGDPTFMNNVPDHLLSDKDLPTFKFALEKSKGKVIGKSSGKEATVVQLPISKGIAGVSMTLEPGAMRELHWHATAAEWAFVLTGHVRTTVIDPQGAAETNDFGPGDVWYFPRGHGHMLECLGDKPAHFILIFDNGYFSEFGTFSITDWIGHTPKALLAKNFGLPESAFDGFPKKEVYFARGAVPPATPAAPLQGLKLPPLTHKYELLEQAPHKVFKGGREWRVDSTRFPISKTVTGVVLDLEPGALRELHWHPNADEWQYVIDGNISVTMFGSHGRYRTEQMEAGDVGYIPQGYGHSIENVGDRPCRVLIGFNTGNYQAIDLSQWIAGNPADVLATNFSKPTSLFEKFPKQDVFIAPGKGQTGHHHHHH

SEQ ID NO: 301 - DNA, 1107 bp, synthetic construct
  misc_feature 1..1107: note = Variant of oxalate decarboxylase from Gemmata sp. SH-PL17
  source 1..1107: mol_type = other DNA
atgggtgatccgacctttatgaataatgtgccagaccatctgctggcggataaagatttgccgacgttcaagtttgaactggaaaagagcaagggcaaagtcattgggaaaagttcgggaaaagaagcaaccgttgttcagttacctatctccaaaggcattgctggtgtgagcatgactcttgaaccgggtgcgatgcgcgaattgcactggcatgccacagcagcagagtgggctttcgtattaaccggccacgtccgtacgacggtgatcgatccacaaggtgcggccgaaaccaacgactttggaccgggcgacgtgtggtattttcctcgcggtcatgggcacatgctggaatgcctgggcgataaaccggcgcatttcattctgatcttcgataacggctacttctcagagtttggcaccttctctattactgactggatcggtcacacaccgaaagcgcttctcgccaagaactttggtctgcccgaatcggcttttgatgggtttcccaaaaaagaggtctattttgcacgtggcgcggttccaccagccacccctgcagcgcctttacagggacgtgtattgccaccactcacgcataaatacgaactcctcgaacaagaacctcataaagttttcaaaggtggtcgtgaatggcgcgtggatagctcgcgttttcccatttccaagactgtaaccggcgttgttcttgatttggaacccggcgcgttacgcgagcttcactggcatcctaatgctgacgagtggcaatatgtgatcgatggcaacattagtgtgacgatgttcggttctcatggccgttaccgcaccgaacagatggaggcgggtgatgtcgggtatattccacaggggtatggccacagcatcgaaaatgtgggagatcgtccttgtcgcgtcttgattggctttaacacaggtaactaccaagcgatcgacttatcacagtggattgcaggtaatcccgcggatgttcttgccacgaacttctccaaacccaccagcctctttgaaaagttcccaaaacaggacgtgtttattgctcctggcaagggccaaactggccaccatcaccatcaccat

SEQ ID NO: 302 - protein, 369 aa, synthetic construct
  REGION 1..369: note = Variant of oxalate decarboxylase from Gemmata sp. SH-PL17
MGDPTFMNNVPDHLLADKDLPTFKFELEKSKGKVIGKSSGKEATVVQLPISKGIAGVSMTLEPGAMRELHWHATAAEWAFVLTGHVRTTVIDPQGAAETNDFGPGDVWYFPRGHGHMLECLGDKPAHFILIFDNGYFSEFGTFSITDWIGHTPKALLAKNFGLPESAFDGFPKKEVYFARGAVPPATPAAPLQGRVLPPLTHKYELLEQEPHKVFKGGREWRVDSSRFPISKTVTGVVLDLEPGALRELHWHPNADEWQYVIDGNISVTMFGSHGRYRTEQMEAGDVGYIPQGYGHSIENVGDRPCRVLIGFNTGNYQAIDLSQWIAGNPADVLATNFSKPTSLFEKFPKQDVFIAPGKGQTGHHHHHH

SEQ ID NO: 303 - DNA, 1107 bp, synthetic construct
  misc_feature 1..1107: note = Variant of oxalate decarboxylase from Gemmata sp. SH-PL17
  source 1..1107: mol_type = other DNA
atgggtgatccgacctttatgaataatgtgccagaccatctgctggcggataaagatttgccgacgttcaagtttgccctggaaaagagcaagggcaaagtcattgggaaaagttcgggaaaagaagcaaccgttgttcagttacctatctccaaaggcattgctggtgtgagcatgactcttgaaccgggtgcgatgcgcgaattgcactggcatgccacagcagcagagtgggctttcgtattaaccggccacgtccgtacgacggtgatcgatccacaaggtgcggccgaaaccaacgactttggaccgggcgacgtgtggtattttcctcgcggtcatgggcacatgctggaatgcctgggcgataaaccggcgcatttcattctgatcttcgataacggctacttctcagagtttggcaccttctctattactgactggatcggtcacacaccgaaagcgcttctcgccaagaactttggtctgcccgaatcggcttttgatgggtttcccaaagacgaggtctattttgcacgtggcgcggttccaccagccacccctgcagcgcctttacagggacgcaaattgccaccactcacgcataaatacgaactcctcgaacaagctcctcttaaagttttcaaaggtggtcgtgaatggcgcgtggatagcacccgttttcccatttccaagactgtaaccggcgttgttcttgatttggaacccggcgcgttacgcgagcttcactggcatcctaatgctgacgagtggcaatatgtgatcgatggcaacattagtgtgacgatgttcggttctcatggccgttaccgcaccgaacagatggagaaaggtgatgtcgggtatattccacaggggtatggccacagcatcgaaaatgtgggagatcgtccttgtcgcgtcttgattggctttaacacaggtaactaccaagcgatcgacttatcacagtggattgcaggtaatcccgcggatgttcttgccacgaacttctccaaacccaccagcctctttgaaaagttcccaaaacaggacgtgtttattgctcctggcaagggccaaactggccaccatcaccatcaccat

SEQ ID NO: 304 - protein, 369 aa, synthetic construct
  REGION 1..369: note = Variant of oxalate decarboxylase from Gemmata sp. SH-PL17
MGDPTFMNNVPDHLLADKDLPTFKFALEKSKGKVIGKSSGKEATVVQLPISKGIAGVSMTLEPGAMRELHWHATAAEWAFVLTGHVRTTVIDPQGAAETNDFGPGDVWYFPRGHGHMLECLGDKPAHFILIFDNGYFSEFGTFSITDWIGHTPKALLAKNFGLPESAFDGFPKDEVYFARGAVPPATPAAPLQGRKLPPLTHKYELLEQAPLKVFKGGREWRVDSTRFPISKTVTGVVLDLEPGALRELHWHPNADEWQYVIDGNISVTMFGSHGRYRTEQMEKGDVGYIPQGYGHSIENVGDRPCRVLIGFNTGNYQAIDLSQWIAGNPADVLATNFSKPTSLFEKFPKQDVFIAPGKGQTGHHHHHH

SEQ ID NO: 305 - DNA, 1107 bp, synthetic construct
  misc_feature 1..1107: note = Variant of oxalate decarboxylase from Gemmata sp. SH-PL17
  source 1..1107: mol_type = other DNA
atgggtgatccgacctttatgaataatgtgccagaccatctgctggcggataaagatttgccgacgttcaagtttgcactggaaaagagcaagggcaaagtcattgggaaaagttcgggaaaagaagcaaccgttgttcagttacctatctccaaaggcattgctggtgtgagcatgactcttgaaccgggtgcgatgcgcgaattgcactggcatgccacagcagcagagtgggctttcgtattaaccggccacgtccgtacgacggtgatcgatccacaaggtgcggccgaaaccaacgactttggaccgggcgacgtgtggtattttcctcgcggtcatgggcacatgctggaatgcctgggcgataaaccggcgcatttcattctgatcttcgataacggctacttctcagagtttggcaccttctctattactgactggatcggtcacacaccgaaagcgcttctcgccaagaactttggtctgcccgaatcggcttttgatgggtttcccaaaaaagaggtctattttgcacgtggcgcggttccaccagccacccctgcagcgcctttacagggacgtgtattgccaccactcacgcataaatacgaactcctcgaacaagctcctcataaagttttcaaaggtggtcgtgaatggcgcgtggatagctcgcgttttcccatttccaagactgtaaccggcgttgttcttgatttggaacccggcgcgttacgcgagcttcactggcatcctaatgctgacgagtggcaatatgtgatcgatggcaacattagtgtgacgatgttcggttctcatggccgttaccgcaccgaacagatggaggcgggtgatgtcgggtatattccacaggggtatggccacagcatcgaaaatgtgggagatcgtccttgtcgcgtcttgattggctttaacacaggtaactaccaagcgatcgacttatcacagtggattgcaggtaatcccgcggatgttcttgccacgaacttctccaaacccaccagcctctttgaaaagttcccaaaacaggacgtgtttattgctcctggcaagggccaaactggccaccatcaccatcaccat

SEQ ID NO: 306 - protein, 369 aa, synthetic construct
  REGION 1..369: note = Variant of oxalate decarboxylase from Gemmata sp. SH-PL17
MGDPTFMNNVPDHLLADKDLPTFKFALEKSKGKVIGKSSGKEATVVQLPISKGIAGVSMTLEPGAMRELHWHATAAEWAFVLTGHVRTTVIDPQGAAETNDFGPGDVWYFPRGHGHMLECLGDKPAHFILIFDNGYFSEFGTFSITDWIGHTPKALLAKNFGLPESAFDGFPKKEVYFARGAVPPATPAAPLQGRVLPPLTHKYELLEQAPHKVFKGGREWRVDSSRFPISKTVTGVVLDLEPGALRELHWHPNADEWQYVIDGNISVTMFGSHGRYRTEQMEAGDVGYIPQGYGHSIENVGDRPCRVLIGFNTGNYQAIDLSQWIAGNPADVLATNFSKPTSLFEKFPKQDVFIAPGKGQTGHHHHHH

SEQ ID NO: 307 - DNA, 1107 bp, synthetic construct
  misc_feature 1..1107: note = Variant of oxalate decarboxylase from Gemmata sp. SH-PL17
  source 1..1107: mol_type = other DNA
atgggtgatccgacctttatgaataatgtgccagaccatctgctggcggataaagatttgccgacgttcaagtttgcactggaaaagagcaagggcaaagtcattgggaaaagttcgggaaaagaagcaaccgttgttcagttacctatctccaaaggcattgctggtgtgagcatgactcttgaaccgggtgcgatgcgcgaattgcactggcatgccacagcagcagagtgggctttcgtattaaccggccacgtccgtacgacggtgatcgatccacaaggtgcggccgaaaccaacgactttggaccgggcgacgtgtggtattttcctcgcggtcatgggcacatgctggaatgcctgggcgatgcaccggcgcatttcattctgatcttcgataacggctacttctcagagtttggcaccttctctattactgactggatcggtcacacaccgaaagcgcttctcgccaagaactttggtctgcccgaatcggcttttgatgggtttcccaaaaaagaggtctattttgcacgtggcgcggttccaccagccacccctgcagcgcctttacagggacgtgtattgccaccactcacgcataaatacgaactcctcgaacaagctcctcataaagttttcaaaggtggtcgtgaatggcgcgtggatagcacgcgttttcccatttccaagactgtaaccggcgttgttcttgatttggaacccggcgcgttacgcgagcttcactggcatcctaatgctgacgagtggcaatatgtgatcgatggcaacattagtgtgacgatgttcggttctcatggccgttaccgcaccgaacagatggagaagggtgatgtcgggtatattccacaggggtatggccacagcatcgaaaatgtgggagatcgtccttgtcgcgtcttgattggctttaacacaggtaactaccaagcgatcgacttatcacagtggattgcaggtaatcccgcggatgttcttgccacgaacttctccaaacccaccagcctctttgaaaagttcccaaaacaggacgtgtttattgctcctggcaagggccaaactggccaccatcaccatcaccat

SEQ ID NO: 308 - protein, 369 aa, synthetic construct
  REGION 1..369: note = Variant of oxalate decarboxylase from Gemmata sp. SH-PL17
MGDPTFMNNVPDHLLADKDLPTFKFALEKSKGKVIGKSSGKEATVVQLPISKGIAGVSMTLEPGAMRELHWHATAAEWAFVLTGHVRTTVIDPQGAAETNDFGPGDVWYFPRGHGHMLECLGDAPAHFILIFDNGYFSEFGTFSITDWIGHTPKALLAKNFGLPESAFDGFPKKEVYFARGAVPPATPAAPLQGRVLPPLTHKYELLEQAPHKVFKGGREWRVDSTRFPISKTVTGVVLDLEPGALRELHWHPNADEWQYVIDGNISVTMFGSHGRYRTEQMEKGDVGYIPQGYGHSIENVGDRPCRVLIGFNTGNYQAIDLSQWIAGNPADVLATNFSKPTSLFEKFPKQDVFIAPGKGQTGHHHHHH

SEQ ID NO: 309 - DNA, 1107 bp, synthetic construct
  misc_feature 1..1107: note = Variant of oxalate decarboxylase from Gemmata sp. SH-PL17
  source 1..1107: mol_type = other DNA
atgggtgatccgacctttatgaataatgtgccagaccatctgctggcggataaagatttgccgacgttcaagtttgaactggaaaagagcaagggcaaagtcattgggaaaagttcgggaaaagaagcaaccgttgttcagttacctatctccaaaggcattgctggtgtgagcatgactcttgaaccgggtgcgatgcgcgaattgcactggcatgccacagcagcagagtgggctttcgtattaaccggccacgtccgtacgacggtgatcgatccacaaggtgcggccgaaaccaacgactttggaccgggcgacgtgtggtattttcctcgcggtcatgggcacatgctggaatgcctgggcgataaaccggcgcatttcattctgatcttcgataacggctacttctcagagtttggcaccttctctattactgactggatcggtcacacaccgaaagcgcttctcgccaagaactttggtctgcccgaatcggcttttgatgggtttcccaaaaaagaggtctattttgcacgtggcgcggttccaccagccacccctgcagcgcctttacagggactgaagttgccaccactcacgcataaatacgaactcctcgaacaagaacctcataaagttttcaaaggtggtcgtgaatggcgcgtggatagctcgcgttttcccatttccaagactgtaaccggcgttgttcttgatttggaacccggcgcgttacgcgagcttcactggcatcctaatgctgacgagtggcaatatgtgatcgatggcaacattagtgtgacgatgttcggttctcatggccgttaccgcaccgaacagatggagaagggtgatgtcgggtatattccacaggggtatggccacagcatcgaaaatgtgggagatcgtccttgtcgcgtcttgattggctttaacacaggtaactaccaagcgatcgacttatcacagtggattgcaggtaatcccgcggatgttcttgccacgaacttctccaaacccaccagcctctttgaaaagttcccaaaacaggacgtgtttattgctcctggcaagggccaaactggccaccatcaccatcaccat

SEQ ID NO: 310 - protein, 369 aa, synthetic construct
  REGION 1..369: note = Variant of oxalate decarboxylase from Gemmata sp. SH-PL17
MGDPTFMNNVPDHLLADKDLPTFKFELEKSKGKVIGKSSGKEATVVQLPISKGIAGVSMTLEPGAMRELHWHATAAEWAFVLTGHVRTTVIDPQGAAETNDFGPGDVWYFPRGHGHMLECLGDKPAHFILIFDNGYFSEFGTFSITDWIGHTPKALLAKNFGLPESAFDGFPKKEVYFARGAVPPATPAAPLQGLKLPPLTHKYELLEQEPHKVFKGGREWRVDSSRFPISKTVTGVVLDLEPGALRELHWHPNADEWQYVIDGNISVTMFGSHGRYRTEQMEKGDVGYIPQGYGHSIENVGDRPCRVLIGFNTGNYQAIDLSQWIAGNPADVLATNFSKPTSLFEKFPKQDVFIAPGKGQTGHHHHHH

SEQ ID NO: 311 - DNA, 1107 bp, synthetic construct
  misc_feature 1..1107: note = Variant of oxalate decarboxylase from Gemmata sp. SH-PL17
  source 1..1107: mol_type = other DNA
atgggtgatccgacctttatgaataatgtgccagaccatctgctggcggataaagatttgccgacgttcaagtttgccctggaaaagagcaagggcaaagtcattgggaaaagttcgggaaaagaagcaaccgttgttcagttacctatctccaaaggcattgctggtgtgagcatgactcttgaaccgggtgcgatgcgcgaattgcactggcatgccacagcagcagagtgggctttcgtattaaccggccacgtccgtacgacggtgatcgatccacaaggtgcggccgaaaccaacgactttggaccgggcgacgtgtggtattttcctcgcggtcatgggcacatgctggaatgcctgggcgataaaccggcgcatttcattctgatcttcgataacggctacttctcagagtttggcaccttctctattactgactggatcggtcacacaccgaaagcgcttctcgccaagaactttgctctgcccgaatcggcttttgatgggtttcccaaagacgaggtctattttgcacgtggcgcggttccaccagccacccctgcagcgcctttacagggacgcaaattgccaccactcacgcataaatacgaactcctcgaacaagctcctcataaagttttcaaaggtggtcgtgaatggcgcgtggatagcacccgttttcccatttccaagactgtaaccggcgttgttcttgatttggaacccggcgcgttacgcgagcttcactggcatcctaatgctgacgagtggcaatatgtgatcgatggcaacattagtgtgacgatgttcggttctcatggccgttaccgcaccgaacagatggagaaaggtgatgtcgggtatattccacaggggtatggccacagcatcgaaaatgtgggagatcgtccttgtcgcgtcttgattggctttaacacaggtaactaccaagcgatcgacttatcacagtggattgcaggtaatcccgcggatgttcttgccacgaacttctccaaacccaccagcctctttgaaaagttcccaaaacaggacgtgtttattgctcctggcaagggccaaactggccaccatcaccatcaccat

SEQ ID NO: 312 - protein, 369 aa, synthetic construct
  REGION 1..369: note = Variant of oxalate decarboxylase from Gemmata sp. SH-PL17
MGDPTFMNNVPDHLLADKDLPTFKFALEKSKGKVIGKSSGKEATVVQLPISKGIAGVSMTLEPGAMRELHWHATAAEWAFVLTGHVRTTVIDPQGAAETNDFGPGDVWYFPRGHGHMLECLGDKPAHFILIFDNGYFSEFGTFSITDWIGHTPKALLAKNFALPESAFDGFPKDEVYFARGAVPPATPAAPLQGRKLPPLTHKYELLEQAPHKVFKGGREWRVDSTRFPISKTVTGVVLDLEPGALRELHWHPNADEWQYVIDGNISVTMFGSHGRYRTEQMEKGDVGYIPQGYGHSIENVGDRPCRVLIGFNTGNYQAIDLSQWIAGNPADVLATNFSKPTSLFEKFPKQDVFIAPGKGQTGHHHHHH

SEQ ID NO: 313 - DNA, 1107 bp, synthetic construct
  misc_feature 1..1107: note = Variant of oxalate decarboxylase from Gemmata sp. SH-PL17
  source 1..1107: mol_type = other DNA
atgggtgatccgacctttatgaataatgtgccagaccatctgctgtcggataaagatttgccgacgttcaagtttgcactggaaaagagcaagggcaaagtcattgggaaaagttcgggaaaagaagcaaccgttgttcagttacctatctccaaaggcattgctggtgtgagcatgactcttgaaccgggtgcgatgcgcgaattgcactggcatgccacagcagcagagtgggctttcgtattaaccggccacgtccgtacgacggtgatcgatccacaaggtgcggccgaaaccaacgactttggaccgggcgacgtgtggtattttcctcgcggtcatgggcacatgctggaatgcctgggcgatgcaccggcgcatttcattctgatcttcgataacggctacttctcagagtttggcaccttctctattactgactggatcggtcacacaccgaaagcgcttctcgccaagaactttggtctgcccgaatcggcttttgatgggtttcccaaagatgaggtctattttgcacgtggcgcggttccaccagccacccctgcagcgcctttacagggactggtattgccaccactcacgcataaatacgaactcctcgaacaagctcctcataaagttttcaaaggtggtcgtgaatggcgcgtggatagcacccgttttcccatttccaagactgtaaccggcgttgttcttgatttggaacccggcgcgttacgcgagcttcactggcatcctaatgctgacgagtggcaatatgtgatcgatggcaacattagtgtgacgatgttcggttctcatggccgttaccgcaccgaacagatggaggcgggtgatgtcgggtatattccacaggggtatggccacagcatcgaaaatgtgggagatcgtccttgtcgcgtcttgattggctttaacacaggtaactaccaagcgatcgacttatcacagtggattgcaggtaatcccgcggatgttcttgccacgaacttctccaaacccaccagcctctttgaaaagttcccaaaacaggacgtgtttattgctcctggcaagggccaaactggccaccatcaccatcaccat

SEQ ID NO: 314 - protein, 369 aa, synthetic construct
  REGION 1..369: note = Variant of oxalate decarboxylase from Gemmata sp. SH-PL17
MGDPTFMNNVPDHLLSDKDLPTFKFALEKSKGKVIGKSSGKEATVVQLPISKGIAGVSMTLEPGAMRELHWHATAAEWAFVLTGHVRTTVIDPQGAAETNDFGPGDVWYFPRGHGHMLECLGDAPAHFILIFDNGYFSEFGTFSITDWIGHTPKALLAKNFGLPESAFDGFPKDEVYFARGAVPPATPAAPLQGLVLPPLTHKYELLEQAPHKVFKGGREWRVDSTRFPISKTVTGVVLDLEPGALRELHWHPNADEWQYVIDGNISVTMFGSHGRYRTEQMEAGDVGYIPQGYGHSIENVGDRPCRVLIGFNTGNYQAIDLSQWIAGNPADVLATNFSKPTSLFEKFPKQDVFIAPGKGQTGHHHHHH

SEQ ID NO: 315 - DNA, 1107 bp, synthetic construct
  misc_feature 1..1107: note = Variant of oxalate decarboxylase from Gemmata sp. SH-PL17
  source 1..1107: mol_type = other DNA
atgggtgatccgacctttatgaataatgtgccagaccatctgctggcggataaagatttgccgacgttcaagtttgccctggaaaagagcaagggcaaagtcattgggaaaagttcgggaaaagaagcaaccgttgttcagttacctatctccaaaggcattgctggtgtgagcatgactcttgaaccgggtgcgatgcgcgaattgcactggcatgccacagcagcagagtgggctttcgtattaaccggccacgtccgtacgacggtgatcgatccacaaggtgcggccgaaaccaacgactttggaccgggcgacgtgtggtattttcctcgcggtcatgggcacatgctggaatgcctgggcgataaaccggcgcatttcattctgatcttcgataacggctacttctcagagtttggcaccttctctattactgactggatcggtcacacaccgaaagcgcttctcgccaagaactttggtctgcccgaatcggcttttgacgggtttcccaaggacgaggtctattttgcacgtggcgcggttccaccagccacccctgcagcgcctttacagggacgcaaattgccaccactcacgcataaatacgaaatgctcgaacaagctcctcataaagttttcaaaggtggtcgtgaatggcgcgtggatagcacccgttttcccatttccaagactgtaaccggcgttgttcttgatttggaacccggcgcgttacgcgagcttcactggcatcctaatgctgacgagtggcaatatgtgatcgatggcaacattagtgtgacgatgttcggttctcatggccgttaccgcaccgaacagatggagaaaggtgatgtcgggtatattccacaggggtatggccacagcatcgaaaatgtgggagatcgtccttgtcgcgtcttgattggctttaacacaggtaactaccaagcgatcgacttatcacagtggattgcaggtaatcccgcggatgttcttgccacgaacttcagcaaacccacccgcctctttgaaaagttcccaaaacaggacgtgtttattgctcctggcaagggccaaactggccaccatcaccatcaccat

SEQ ID NO: 316 - protein, 369 aa, synthetic construct
  REGION 1..369: note = Variant of oxalate decarboxylase from Gemmata sp. SH-PL17
MGDPTFMNNVPDHLLADKDLPTFKFALEKSKGKVIGKSSGKEATVVQLPISKGIAGVSMTLEPGAMRELHWHATAAEWAFVLTGHVRTTVIDPQGAAETNDFGPGDVWYFPRGHGHMLECLGDKPAHFILIFDNGYFSEFGTFSITDWIGHTPKALLAKNFGLPESAFDGFPKDEVYFARGAVPPATPAAPLQGRKLPPLTHKYEMLEQAPHKVFKGGREWRVDSTRFPISKTVTGVVLDLEPGALRELHWHPNADEWQYVIDGNISVTMFGSHGRYRTEQMEKGDVGYIPQGYGHSIENVGDRPCRVLIGFNTGNYQAIDLSQWIAGNPADVLATNFSKPTRLFEKFPKQDVFIAPGKGQTGHHHHHH

SEQ ID NO: 317 - DNA, 1107 bp, synthetic construct
  misc_feature 1..1107: note = Variant of oxalate decarboxylase from Gemmata sp. SH-PL17
  source 1..1107: mol_type = other DNA
atgggtgatccgacctttatgaataatgtgccagaccatctgctgtcggataaagatttgccgacgttcaagtttgcactggaaaagagcaagggcaaagtcattgggaaaagttcgggaaaagaagcaaccgttgttcagttacctatctccaaaggcattgctggtgtgagcatgactcttgaaccgggtgcgatgcgcgaattgcactggcatgccacagcagcagagtgggctttcgtattaaccggccacgtccgtacgacggtgatcgatccacaaggtgcggccgaaaccaacgactttggaccgggcgacgtgtggtattttcctcgcggtcatgggcacatgctggaatgcctgggcgataaaccggcgcatttcattctgatcttcgataacggctacttctcagagtttggcaccttctctattactgactggatcggtcacacaccgaaagcgcttctcgccaagaactttggtctgcccgaatcggcttttgatgggtttcccaaagatgaggtctattttgcacgtggcgcggttccaccagccacccctgcagcgcctttacagggactggtattgccaccactcacgcataaatacgaactcctcgaacaagctcctcataaagttttcaaaggtggtcgtgaatggcgcgtggatagcacgcgttttcccatttccaagactgtaaccggcgttgttcttgatttggaacccggcgcgttacgcgagcttcactggcatcctaatgctgacgagtggcaatatgtgatcgatggcaacattagtgtgacgatgttcggttctcatggccgttaccgcaccgaacagatggagaagggtgatgtcgggtatattccacaggggtatggccacagcatcgaaaatgtgggagatcgtccttgtcgcgtcttgattggctttaacacaggtaactaccaagcgatcgacttatcacagtggattgcaggtaatcccgcggatgttcttgccacgaacttctccaaacccaccagcctctttgaaaagttcccaaaacaggacgtgtttattgctcctggcaagggccaaactggccaccatcaccatcaccat

SEQ ID NO: 318 - protein, 369 aa, synthetic construct
  REGION 1..369: note = Variant of oxalate decarboxylase from Gemmata sp. SH-PL17
MGDPTFMNNVPDHLLSDKDLPTFKFALEKSKGKVIGKSSGKEATVVQLPISKGIAGVSMTLEPGAMRELHWHATAAEWAFVLTGHVRTTVIDPQGAAETNDFGPGDVWYFPRGHGHMLECLGDKPAHFILIFDNGYFSEFGTFSITDWIGHTPKALLAKNFGLPESAFDGFPKDEVYFARGAVPPATPAAPLQGLVLPPLTHKYELLEQAPHKVFKGGREWRVDSTRFPISKTVTGVVLDLEPGALRELHWHPNADEWQYVIDGNISVTMFGSHGRYRTEQMEKGDVGYIPQGYGHSIENVGDRPCRVLIGFNTGNYQAIDLSQWIAGNPADVLATNFSKPTSLFEKFPKQDVFIAPGKGQTGHHHHHH

SEQ ID NO: 319 - DNA, 1107 bp, synthetic construct
  misc_feature 1..1107: note = Variant of oxalate decarboxylase from Gemmata sp. SH-PL17
  source 1..1107: mol_type = other DNA
atgggtgatccgacctttatgaataatgtgccagaccatctgctgtcggataaagatttgccgacgttcaagtttgaactggaaaagagcaagggcaaagtcattgggaaaagttcgggaaaagaagcaaccgttgttcagttacctatctccaaaggcattgctggtgtgagcatgactcttgaaccgggtgcgatgcgcgaattgcactggcatgccacagcagcagagtgggctttcgtattaaccggccacgtccgtacgacggtgatcgatccacaaggtgcggccgaaaccaacgactttggaccgggcgacgtgtggtattttcctcgcggtcatgggcacatgctggaatgcctgggcgataaaccggcgcatttcattctgatcttcgataacggctacttctcagagtttggcaccttctctattactgactggatcggtcacacaccgaaagcgcttctcgccaagaactttggtctgcccgaatcggcttttgatgggtttcccaaaaaagaggtctattttgcacgtggcgcggttccaccagccacccctgcagcgcctttacagggactggtattgccaccactcacgcataaatacgaactcctcgaacaagaacctcataaagttttcaaaggtggtcgtgaatggcgcgtggatagctcgcgttttcccatttccaagactgtaaccggcgttgttcttgatttggaacccggcgcgttacgcgagcttcactggcatcctaatgctgacgagtggcaatatgtgatcgatggcaacattagtgtgacgatgttcggttctcatggccgttaccgcaccgaacagatggagaagggtgatgtcgggtatattccacaggggtatggccacagcatcgaaaatgtgggagatcgtccttgtcgcgtcttgattggctttaacacaggtaactaccaagcgatcgacttatcacagtggattgcaggtaatcccgcggatgttcttgccacgaacttctccaaacccaccagcctctttgaaaagttcccaaaacaggacgtgtttattgctcctggcaagggccaaactggccaccatcaccatcaccat

SEQ ID NO: 320 - protein, 369 aa, synthetic construct
  REGION 1..369: note = Variant of oxalate decarboxylase from Gemmata sp. SH-PL17
MGDPTFMNNVPDHLLSDKDLPTFKFELEKSKGKVIGKSSGKEATVVQLPISKGIAGVSMTLEPGAMRELHWHATAAEWAFVLTGHVRTTVIDPQGAAETNDFGPGDVWYFPRGHGHMLECLGDKPAHFILIFDNGYFSEFGTFSITDWIGHTPKALLAKNFGLPESAFDGFPKKEVYFARGAVPPATPAAPLQGLVLPPLTHKYELLEQEPHKVFKGGREWRVDSSRFPISKTVTGVVLDLEPGALRELHWHPNADEWQYVIDGNISVTMFGSHGRYRTEQMEKGDVGYIPQGYGHSIENVGDRPCRVLIGFNTGNYQAIDLSQWIAGNPADVLATNFSKPTSLFEKFPKQDVFIAPGKGQTGHHHHHH

SEQ ID NO: 321 - DNA, 1107 bp, synthetic construct
  misc_feature 1..1107: note = Variant of oxalate decarboxylase from Gemmata sp. SH-PL17
  source 1..1107: mol_type = other DNA
atgggtgatccgacctttatgaataatgtgccagaccatctgctggcggataaagatttgccgacgttcaagtttgcactggaaaagagcaagggcaaagtcattgggaaaagttcgggaaaagaagcaaccgttgttcagttacctatctccaaaggcattgctggtgtgagcatgactcttgaaccgggtgcgatgcgcgaattgcactggcatgccacagcagcagagtgggctttcgtattaaccggccacgtccgtacgacggtgatcgatccacaaggtgcggccgaaaccaacgactttggaccgggcgacgtgtggtattttcctcgcggtcatgggcacatgctggaatgcctgggcgataaaccggcgcatttcattctgatcttcgataacggctacttctcagagtttggcaccttctctattactgactggatcggtcacacaccgaaaccgcttctcgccaagaactttggtctgcccgaatcggcttttgatgggtttcccaaagacgaggtctattttgcacgtggcgcggttccaccagccacccctgcagcgcctttacagggactggtattgccaccactcacgcataaatacgaactcctcgaacaagctcctcataaagttttcaaaggtggtcgtgaatggcgcgtggatagctcgcgttttcccatttccaagactgtaaccggcgttgttcttgatttggaacccggcgcgttacgcgagcttcactggcatcctaatgctgacgagtggcaatatgtgatcgatggcaacattagtgtgacgatgttcggttctcatggccgttaccgcaccgaacagatggagaagggtgatgtcgggtatattccacaggggtatggccacagcatcgaaaatgtgggagatcgtccttgtcgcgtcttgattggctttaacacaggtaactaccaagcgatcgacttatcacagtggattgcaggtaatcccgcggatgttcttgccacgaacttctccaaacccaccagcctctttgaaaagttcccaaaacaggacgtgtttattgctcctggcaagggccaaactggccaccatcaccatcaccat

SEQ ID NO: 322 - protein, 369 aa, synthetic construct
  REGION 1..369: note = Variant of oxalate decarboxylase from Gemmata sp. SH-PL17
MGDPTFMNNVPDHLLADKDLPTFKFALEKSKGKVIGKSSGKEATVVQLPISKGIAGVSMTLEPGAMRELHWHATAAEWAFVLTGHVRTTVIDPQGAAETNDFGPGDVWYFPRGHGHMLECLGDKPAHFILIFDNGYFSEFGTFSITDWIGHTPKPLLAKNFGLPESAFDGFPKDEVYFARGAVPPATPAAPLQGLVLPPLTHKYELLEQAPHKVFKGGREWRVDSSRFPISKTVTGVVLDLEPGALRELHWHPNADEWQYVIDGNISVTMFGSHGRYRTEQMEKGDVGYIPQGYGHSIENVGDRPCRVLIGFNTGNYQAIDLSQWIAGNPADVLATNFSKPTSLFEKFPKQDVFIAPGKGQTGHHHHHH

SEQ ID NO: 323 - DNA, 1107 bp, synthetic construct
  misc_feature 1..1107: note = Variant of oxalate decarboxylase from Gemmata sp. SH-PL17
  source 1..1107: mol_type = other DNA
atgggtgatccgacctttatgaataatgtgccagaccatctgctggcggatcaggatttgccgacgttcaagtttgccctggaaaagagcaagggcaaagtcattgggaaaagttcgggaaaagaagcaaccgttgttcagttacctatctccaaaggcattgctggtgtgagcatgactcttgaaccgggtgcgatgcgcgaattgcactggcatgccacagcagcagagtgggctttcgtattaaccggccacgtccgtacgacggtgatcgatccacaaggtgcggccgaaaccaacgactttggaccgggcgacgtgtggtattttcctcgcggtcatgggcacatgctggaatgcctgggcgataaaccggcgcatttcattctgatcttcgataacggctacttctcagagtttggcaccttctctattactgactggatcggtcacacaccgaaagcgcttctcgccaagaactttggtctgcccgaatcggcttttgatgggtttcccaaagacgaggtctattttgcacgtggcgcggttccaccagccacccctgcagcgcctttacagggacgcaaattgccaccactcacgcataaatacgaactcctcgaacaagctcctcataaagttttcaaaggtggtcgtgaatggcgcgtggatagcacccgttttcccatttccaagactgtaaccggcgttgttcttgatttggaacccggcgcgttacgcgagcttcactggcatcctaatgctgacgagtggcaatatgtgatcgatggcaacattagtgtgacgatgttcggttctcatggccgttaccgcaccgaacagatggagaaaggtgatgtcgggtatattccacaggggtatggccacagcatcgaaaatgtgggagatcgtccttgtcgcgtcttgattggctttaacacaggtaactaccaagcgatcgacttatcacagtggattgcaggtaatcccgcggatgttcttgccacgaacttctccaaacccaccagcctctttgaaaagttcccaaaacaggacgtgtttattgctcctggcaagggccaaactggccaccatcaccatcaccat

SEQ ID NO: 324 - protein, 369 aa, synthetic construct
  REGION 1..369: note = Variant of oxalate decarboxylase from Gemmata sp. SH-PL17
MGDPTFMNNVPDHLLADQDLPTFKFALEKSKGKVIGKSSGKEATVVQLPISKGIAGVSMTLEPGAMRELHWHATAAEWAFVLTGHVRTTVIDPQGAAETNDFGPGDVWYFPRGHGHMLECLGDKPAHFILIFDNGYFSEFGTFSITDWIGHTPKALLAKNFGLPESAFDGFPKDEVYFARGAVPPATPAAPLQGRKLPPLTHKYELLEQAPHKVFKGGREWRVDSTRFPISKTVTGVVLDLEPGALRELHWHPNADEWQYVIDGNISVTMFGSHGRYRTEQMEKGDVGYIPQGYGHSIENVGDRPCRVLIGFNTGNYQAIDLSQWIAGNPADVLATNFSKPTSLFEKFPKQDVFIAPGKGQTGHHHHHH

SEQ ID NO: 325 - DNA, 1107 bp, synthetic construct
  misc_feature 1..1107: note = Variant of oxalate decarboxylase from Gemmata sp. SH-PL17
  source 1..1107: mol_type = other DNA
atgggtgatccgacctttatgaataatgtgccagaccatctgctggcggataaagatttgccgacgttcaagtttgccctggaaaagagcaagggcaaagtcattgggaaaagttcgggaaaagaagcaaccgttgttcagttacctatctccaaaggcattgctggtgtgagcatgactcttgaaccgggtgcgatgcgcgaattgcactggcatgccacagcagcagagtgggctttcgtattaaccggccacgtccgtacgacggtgatcgatccacaaggtgcggccgaaaccaacgactttggaccgggcgacgtgtggtattttcctcgcggtcatgggcacatgctggaatgcctgggcgataaaccggcgcatttcattctgatcttcgataacggctacttctcagagtttggcaccttctctattactgactggatcggtcacacaccgaaagcgcttctcgccaagaactttggtctgcccgaatcggcttttgatgggtttcccaaagacgaggtctattttgcacgtggcgcggttccaccagccacccctgcagcgcctttacagggacgcaaattgccaccactcacgcataaatacgaactcctcgaacaagctcctcataaagttttcaaaggtggtcgtgaatggcgcgtggatagcacccgttttcccatttccaagactgtaaccggcgttgttcttgatttggaacccggcgcgttacgcgagcttcactggcatcctaatgctgacgagtggcaatatgtgatcgatggcaacattagtgtgacgatgttcggttctcatggccgttaccgcaccgaacagatggagaaaggtgatgtcgggtatattccacaggggtatggccacagcatcgaaaatgtgggagatcgtccttgtcgcgtcttgattggctttaacacaggtaactaccaagcgatcgacttatcacagtggattgcaggtaatcccgcggatgttcttaggacgaacttctccaaacccaccagcctctttgaaaagttcccaaaacaggacgtgtttattgctcctggcaagggccaaactggccaccatcaccatcaccat

SEQ ID NO: 326 - protein, 369 aa, synthetic construct
  REGION 1..369: note = Variant of oxalate decarboxylase from Gemmata sp. SH-PL17
MGDPTFMNNVPDHLLADKDLPTFKFALEKSKGKVIGKSSGKEATVVQLPISKGIAGVSMTLEPGAMRELHWHATAAEWAFVLTGHVRTTVIDPQGAAETNDFGPGDVWYFPRGHGHMLECLGDKPAHFILIFDNGYFSEFGTFSITDWIGHTPKALLAKNFGLPESAFDGFPKDEVYFARGAVPPATPAAPLQGRKLPPLTHKYELLEQAPHKVFKGGREWRVDSTRFPISKTVTGVVLDLEPGALRELHWHPNADEWQYVIDGNISVTMFGSHGRYRTEQMEKGDVGYIPQGYGHSIENVGDRPCRVLIGFNTGNYQAIDLSQWIAGNPADVLRTNFSKPTSLFEKFPKQDVFIAPGKGQTGHHHHHH

SEQ ID NO: 327 - DNA, 1107 bp, synthetic construct
  misc_feature 1..1107: note = Variant of oxalate decarboxylase from Gemmata sp. SH-PL17
  source 1..1107: mol_type = other DNA
atgggtgatccgacctttatgaataatgtgccagaccatctgctggcggataaagatttgccgacgttcaagtttgccctggaaaagagcaagggcaaagtcattgggaaaagttcgggaaaagaagcaaccgttgttcagttacctatctccaaaggcattgctggtgtgagcatgactcttgaaccgggtgcgatgcgcgaattgcactggcatgccacagcagcagagtgggctttcgtattaaccggccacgtccgtacgacggtgatcgatccacaaggtgcggccgaaaccaacgactttggaccgggcgacgtgtggtattttcctcgcggtcatgggcacatgctggaatgcctgggcgatgcaccggcgcatttcattctgatcttcgataacggctacttctcagagtttggcaccttctctattactgactggatcggtcacacaccgaaaccgcttctcgccaagaactttggtctgcccgaatcggcttttgatgggtttcccaaaaaagaggtctattttgcacgtggcgcggttccaccagccacccctgcagcgcctttacagggactgaagttgccaccactcacgcataaatacgaactcctcgaacaagctcctcataaagttttcaaaggtggtcgtgaatggcgcgtggatagctcgcgttttcccatttccaagactgtaaccggcgttgttcttgatttggaacccggcgcgttacgcgagcttcactggcatcctaatgctgacgagtggcaatatgtgatcgatggcaacattagtgtgacgatgttcggttctcatggccgttaccgcaccgaacagatggagaagggtgatgtcgggtatattccacaggggtatggccacagcatcgaaaatgtgggagatcgtccttgtcgcgtcttgattggctttaacacaggtaactaccaagcgatcgacttatcacagtggattgcaggtaatcccgcggatgttcttgccacgaacttctccaaacccaccagcctctttgaaaagttcccaaaacaggacgtgtttattgctcctggcaagggccaaactggccaccatcaccatcaccat

SEQ ID NO: 328 - protein, 369 aa, synthetic construct
  REGION 1..369: note = Variant of oxalate decarboxylase from Gemmata sp. SH-PL17
MGDPTFMNNVPDHLLADKDLPTFKFALEKSKGKVIGKSSGKEATVVQLPISKGIAGVSMTLEPGAMRELHWHATAAEWAFVLTGHVRTTVIDPQGAAETNDFGPGDVWYFPRGHGHMLECLGDAPAHFILIFDNGYFSEFGTFSITDWIGHTPKPLLAKNFGLPESAFDGFPKKEVYFARGAVPPATPAAPLQGLKLPPLTHKYELLEQAPHKVFKGGREWRVDSSRFPISKTVTGVVLDLEPGALRELHWHPNADEWQYVIDGNISVTMFGSHGRYRTEQMEKGDVGYIPQGYGHSIENVGDRPCRVLIGFNTGNYQAIDLSQWIAGNPADVLATNFSKPTSLFEKFPKQDVFIAPGKGQTGHHHHHH

SEQ ID NO: 329 - DNA, 1107 bp, synthetic construct
  misc_feature 1..1107: note = Variant of oxalate decarboxylase from Gemmata sp. SH-PL17
  source 1..1107: mol_type = other DNA
atgggtgatccgacctttatgaataatgtgccagaccatctgctggcgtgtaaagatttgccgacgttcaagtttgccctggaaaagagcaagggcaaagtcattgggaaaagttcgggaaaagaagcaaccgttgttcagttacctatctccaaaggcattgctggtgtgagcatgactcttgaaccgggtgcgatgcgcgaattgcactggcatgccacagcagcagagtgggctttcgtattaaccggccacgtccgtacgacggtgatcgatccacaaggtgcggccgaaaccaacgactttggaccgggcgacgtgtggtattttcctcgcggtcatgggcacatgctggaatgcctgggcgataaaccggcgcatttcattctgatcttcgataacggctacttctcagagtttggcaccttctctattactgactggatcggtcacacaccgaaagcgcttctcgccaagaactttggtctgcccgaatcggcttttgatgggtttcccaaagacgaggtctattttgcacgtggcgcggttccaccagccacccctgcagcgcctttacagggacgcaaattgccaccactcacgcataaatacgaactcctcgaacaagctcctcataaagttttcaaaggtggtcgtgaatggcgcgtggatagcacccgttttcccatttccaagactgtaaccggcgttgttcttgatttggaacccggcgcgttacgcgagcttcactggcatcctaatgctgacgagtggcaatatgtgatcgatggcaacattagtgtgacgatgttcggttctcatggccgttaccgcaccgaacagatggagaaaggtgatgtcgggtatattccacaggggtatggccacagcatcgaaaatgtgggagatcgtccttgtcgcgtcttgattggctttaacacaggtaactaccaagcgatcgacttatcacagtggattgcaggtaatcccgcggatgttcttgccacgaacttctccaaacccaccagcctctttgaaaagttcccaaaacaggacgtgtttattgctcctggcaagggccaaactggccaccatcaccatcaccat

SEQ ID NO: 330 - protein, 369 aa, synthetic construct
  REGION 1..369: note = Variant of oxalate decarboxylase from Gemmata sp. SH-PL17
MGDPTFMNNVPDHLLACKDLPTFKFALEKSKGKVIGKSSGKEATVVQLPISKGIAGVSMTLEPGAMRELHWHATAAEWAFVLTGHVRTTVIDPQGAAETNDFGPGDVWYFPRGHGHMLECLGDKPAHFILIFDNGYFSEFGTFSITDWIGHTPKALLAKNFGLPESAFDGFPKDEVYFARGAVPPATPAAPLQGRKLPPLTHKYELLEQAPHKVFKGGREWRVDSTRFPISKTVTGVVLDLEPGALRELHWHPNADEWQYVIDGNISVTMFGSHGRYRTEQMEKGDVGYIPQGYGHSIENVGDRPCRVLIGFNTGNYQAIDLSQWIAGNPADVLATNFSKPTSLFEKFPKQDVFIAPGKGQTGHHHHHH

SEQ ID NO: 331 - DNA, 1107 bp, synthetic construct
  misc_feature 1..1107: note = Variant of oxalate decarboxylase from Gemmata sp. SH-PL17
  source 1..1107: mol_type = other DNA
atgggtgatccgacctttatgaataatgtgccagaccatctgctggcggataaagatttgccgacgttcaagtttgaactggaaaagagcaagggcaaagtcattgggaaaagttcgggaaaagaagcaaccgttgttcagttacctatctccaaaggcattgctggtgtgagcatgactcttgaaccgggtgcgatgcgcgaattgcactggcatgccacagcagcagagtgggctttcgtattaaccggccacgtccgtacgacggtgatcgatccacaaggtgcggccgaaaccaacgactttggaccgggcgacgtgtggtattttcctcgcggtcatgggcacatgctggaatgcctgggcgataaaccggcgcatttcattctgatcttcgataacggctacttctcagagtttggcaccttctctattactgactggatcggtcacacaccgaaaccgcttctcgccaagaactttggtctgcccgaatcggcttttgatgggtttcccaaaaaagaggtctattttgcacgtggcgcggttccaccagccacccctgcagcgcctttacagggactgaagttgccaccactcacgcataaatacgaactcctcgaacaagctcctcataaagttttcaaaggtggtcgtgaatggcgcgtggatagctcgcgttttcccatttccaagactgtaaccggcgttgttcttgatttggaacccggcgcgttacgcgagcttcactggcatcctaatgctgacgagtggcaatatgtgatcgatggcaacattagtgtgacgatgttcggttctcatggccgttaccgcaccgaacagatggagaagggtgatgtcgggtatattccacaggggtatggccacagcatcgaaaatgtgggagatcgtccttgtcgcgtcttgattggctttaacacaggtaactaccaagcgatcgacttatcacagtggattgcaggtaatcccgcggatgttcttgccacgaacttctccaaacccaccagcctctttgaaaagttcccaaaacaggacgtgtttattgctcctggcaagggccaaactggccaccatcaccatcaccat

SEQ ID NO: 332 - protein, 369 aa, synthetic construct
  REGION 1..369: note = Variant of oxalate decarboxylase from Gemmata sp. SH-PL17
MGDPTFMNNVPDHLLADKDLPTFKFELEKSKGKVIGKSSGKEATVVQLPISKGIAGVSMTLEPGAMRELHWHATAAEWAFVLTGHVRTTVIDPQGAAETNDFGPGDVWYFPRGHGHMLECLGDKPAHFILIFDNGYFSEFGTFSITDWIGHTPKPLLAKNFGLPESAFDGFPKKEVYFARGAVPPATPAAPLQGLKLPPLTHKYELLEQAPHKVFKGGREWRVDSSRFPISKTVTGVVLDLEPGALRELHWHPNADEWQYVIDGNISVTMFGSHGRYRTEQMEKGDVGYIPQGYGHSIENVGDRPCRVLIGFNTGNYQAIDLSQWIAGNPADVLATNFSKPTSLFEKFPKQDVFIAPGKGQTGHHHHHH

SEQ ID NO: 333 - DNA, 1107 bp, synthetic construct
  misc_feature 1..1107: note = Variant of oxalate decarboxylase from Gemmata sp. SH-PL17
  source 1..1107: mol_type = other DNA
atgggtgatccgacctttatgaataatgtgccagaccatctgctggcggataaagatttgccgacgttcaagtttgcactggaaaagagcaagggcaaagtcattgggaaaagttcgggaaaagaagcaaccgttgttcagttacctatctccaaaggcattgctggtgtgagcatgactcttgaaccgggtgcgatgcgcgaattgcactggcatgccacagcagcagagtgggctttcgtattaaccggccacgtccgtacgacggtgatcgatccacaaggtgcggccgaaaccaacgactttggaccgggcgacgtgtggtattttcctcgcggtcatgggcacatgctggaatgcctgggcgataaaccggcgcatttcattctgatcttcgataacggctacttctcagagtttggcaccttctctattactgactggatcggtcacacaccgaaagcgcttctcgccaagaactttggtctgcccgaatcggcttttgatgggtttcccaaagacgaggtctattttgcacgtggcgcggttccaccagccacccctgcagcgcctttacagggactggtattgccaccactcacgcataaatacgaactcctcgaacaagctcctcataaagttttcaaaggtggtcgtgaatggcgcgtggatagcacccgttttcccatttccaagactgtaaccggcgttgttcttgatttggaacccggcgcgttacgcgagcttcactggcatcctaatgctgacgagtggcaatatgtgatcgatggcaacattagtgtgacgatgttcggttctcatggccgttaccgcaccgaacagatggagaaaggtgatgtcgggtatattccacaggggtatggccacagcatcgaaaatgtgggagatcgtccttgtcgcgtcttgattggctttaacacaggtaactaccaagcgatcgacttatcacagtggattgcaggtaatcccgcggatgttcttgccacgaacttctccaaacccaccagcctctttgaaaagttcccaaaacaggacgtgtttattgctcctggcaagggccaaactggccaccatcaccatcaccat

SEQ ID NO: 334 - protein, 369 aa, synthetic construct
  REGION 1..369: note = Variant of oxalate decarboxylase from Gemmata sp. SH-PL17
MGDPTFMNNVPDHLLADKDLPTFKFALEKSKGKVIGKSSGKEATVVQLPISKGIAGVSMTLEPGAMRELHWHATAAEWAFVLTGHVRTTVIDPQGAAETNDFGPGDVWYFPRGHGHMLECLGDKPAHFILIFDNGYFSEFGTFSITDWIGHTPKALLAKNFGLPESAFDGFPKDEVYFARGAVPPATPAAPLQGLVLPPLTHKYELLEQAPHKVFKGGREWRVDSTRFPISKTVTGVVLDLEPGALRELHWHPNADEWQYVIDGNISVTMFGSHGRYRTEQMEKGDVGYIPQGYGHSIENVGDRPCRVLIGFNTGNYQAIDLSQWIAGNPADVLATNFSKPTSLFEKFPKQDVFIAPGKGQTGHHHHHH

SEQ ID NO: 335 - DNA, 1107 bp, synthetic construct
  misc_feature 1..1107: note = Variant of oxalate decarboxylase from Gemmata sp. SH-PL17
  source 1..1107: mol_type = other DNA
atgggtgatccgacctttatgaataatgtgccagaccatctgctggcggataaagatttgccgacgttcaagtttgccctggaaaagagcaagggcaaagtcattgggaaaagttcgggaaaagaagcaaccgttgttcagttacctatctccaaaggcattgctggtgtgagcatgactcttgaaccgggtgcgatgcgcgaattgcactggcatgccacagcagcagagtgggctttcgtattaaccggccacgtccgtacgacggtgatcgatccacaaggtgcggccgaaaccaacgactttggaccgggcgacgtgtggtattttcctcgcggtcatgggcacatgctggaatgcctgggcgataaaccggcgcatttcattctgatcttcgataacggctacttctcagagtttggcaccttctctattactgactggatcggtcacacaccgaaagcgcttctcgccaagaactttacgctgcccgaatcggcttttgatgggtttcccaaagacgaggtctattttgcacgtggcgcggttccaccagccacccctgcagcgcctttacagggacgcaaattgccaccactcacgcataaatacgaactcctcgaacaagctcctcataaagttttcaaaggtggtcgtgaatggcgcgtggatagcacccgttttcccatttccaagactgtaaccggcgttgttcttgatttggaacccggcgcgttacgcgagcttcactggcatcctaatgctgacgagtggcaatatgtgatcgatggcaacattagtgtgacgatgttcggttctcatggccgttaccgcaccgaacagatggagaaaggtgatgtcgggtatattccacaggggtatggccacagcatcgaaaatgtgggagatcgtccttgtcgcgtcttgattggctttaacacaggtaactaccaagcgatcgacttatcacagtggattgcaggtaatcccgcggatgttcttgccacgaacttctccaaacccaccagcctctttgaaaagttcccaaaacaggacgtgtttattgctcctggcaagggccaaactggccaccatcaccatcaccat

SEQ ID NO: 336 - protein, 369 aa, synthetic construct
  REGION 1..369: note = Variant of oxalate decarboxylase from Gemmata sp. SH-PL17
MGDPTFMNNVPDHLLADKDLPTFKFALEKSKGKVIGKSSGKEATVVQLPISKGIAGVSMTLEPGAMRELHWHATAAEWAFVLTGHVRTTVIDPQGAAETNDFGPGDVWYFPRGHGHMLECLGDKPAHFILIFDNGYFSEFGTFSITDWIGHTPKALLAKNFTLPESAFDGFPKDEVYFARGAVPPATPAAPLQGRKLPPLTHKYELLEQAPHKVFKGGREWRVDSTRFPISKTVTGVVLDLEPGALRELHWHPNADEWQYVIDGNISVTMFGSHGRYRTEQMEKGDVGYIPQGYGHSIENVGDRPCRVLIGFNTGNYQAIDLSQWIAGNPADVLATNFSKPTSLFEKFPKQDVFIAPGKGQTGHHHHHH

SEQ ID NO: 337 - DNA, 1107 bp, synthetic construct
  misc_feature 1..1107: note = Variant of oxalate decarboxylase from Gemmata sp. SH-PL17
  source 1..1107: mol_type = other DNA
atgggtgatccgacctttatgaataatgtgccagaccatctgctggcggataaagatttgccgacgttcaagtttgccctggaaaagagcaagggcaaagtcattgggaaaagttcgggaaaagaagcaaccgttgttcagttacctatctccaaaggcattgctggtgtgagcatgactcttgaaccgggtgcgatgcgcgaattgcactggcatgccacagcagcagagtgggctttcgtattaaccggccacgtccgtacgacggtgatcgatccacaaggtgcggccgaaaccaacgactttggaccgggcgacgtgtggtattttcctcgcggtcatgggcacatgctggaatgcctgggcgataaaccggcgcatttcattctgatcttcgataacggctacttctcagagtttggcaccttctctattactgactggatcggtcacacacataaagcgcttctcgccaagaactttggtctgcccgaatcggcttttgatgggtttcccaaagacgaggtctattttgcacgtggcgcggttccaccagccacccctgcagcgcctttacagggacgcaaattgccaccactcacgcataaatacgaactcctcgaacaagctcctcataaagttttcaaaggtggtcgtgaatggcgcgtggatagcacccgttttcccatttccaagactgtaaccggcgttgttcttgatttggaacccggcgcgttacgcgagcttcactggcatcctaatgctgacgagtggcaatatgtgatcgatggcaacattagtgtgacgatgttcggttctcatggccgttaccgcaccgaacagatggagaaaggtgatgtcgggtatattccacaggggtatggccacagcatcgaaaatgtgggagatcgtccttgtcgcgtcttgattggctttaacacaggtaactaccaagcgatcgacttatcacagtggattgcaggtaatcccgcggatgttcttgccacgaacttctccaaacccaccagcctctttgaaaagttcccaaaacaggacgtgtttattgctcctggcaagggccaaactggccaccatcaccatcaccat

SEQ ID NO: 338 - protein, 369 aa, synthetic construct
  REGION 1..369: note = Variant of oxalate decarboxylase from Gemmata sp. SH-PL17
MGDPTFMNNVPDHLLADKDLPTFKFALEKSKGKVIGKSSGKEATVVQLPISKGIAGVSMTLEPGAMRELHWHATAAEWAFVLTGHVRTTVIDPQGAAETNDFGPGDVWYFPRGHGHMLECLGDKPAHFILIFDNGYFSEFGTFSITDWIGHTHKALLAKNFGLPESAFDGFPKDEVYFARGAVPPATPAAPLQGRKLPPLTHKYELLEQAPHKVFKGGREWRVDSTRFPISKTVTGVVLDLEPGALRELHWHPNADEWQYVIDGNISVTMFGSHGRYRTEQMEKGDVGYIPQGYGHSIENVGDRPCRVLIGFNTGNYQAIDLSQWIAGNPADVLATNFSKPTSLFEKFPKQDVFIAPGKGQTGHHHHHH

SEQ ID NO: 339 - DNA, 1107 bp, synthetic construct
  misc_feature 1..1107: note = Variant of oxalate decarboxylase from Gemmata sp. SH-PL17
  source 1..1107: mol_type = other DNA
atgggtgatccgacctttatgaataatgtgccagaccatctgctggcggataaagatttgccgacgttcaagtttgccctggaaaagagcaagggcaaagtcattgggaaaagttcgggaaaagaagcaaccgttgttcagttacctatctccaaaggcattgctggtgtgagcatgactcttgaaccgggtgcgatgcgcgaattgcactggcatgccacagcagcagagtgggctttcgtattaaccggccacgtccgtacgacggtgatcgatccacaaggtgcggccgaaaccaacgactttggaccgggcgacgtgtggtattttcctcgcggtcatgggcacatgctggaatgcctgggcgataaaccggcgcatttcattctgatcttcgataacggctacttctcagagtttggcaccttctctattactgactggatcggtcacacaccgaaagcgcttctcgccaagaactttggtctgcccgaatcggcttttgatgggtttcccaaagacgaggtctattttgcacgtggcgcggttccaccagccacccctgcagcgcctttacagggacgcaaattgccaccactcacgcataaatacgaactcctcgaacaagctcctcataaagttttcaaaggtggtcgtgaatggcgcgtggatagcacccgttttcccatttccaagactgtaaccggcgttgttcttgatttggaacccggcgcgttacgcgagcttcactggcatcctaatgctgacgagtggcaatatgtgatcgatggcaacattagtgtgacgatgttcggttctcatggccgttaccgcaccgaacagatggagaaaggtgatgtcgggtatattccacaggggtatggccacagcatcgaaaatgtgggagatcgtccttgtcgcgtcttgattggctttaacacaggtaagtaccaagcgatcgacttatcacagtggattgcaggtaatcccgcggatgttcttgccacgaacttctccaaacccaccagcctctttgaaaagttcccaaaacaggacgtgtttattgctcctggcaagggccaaactggccaccatcaccatcaccat

SEQ ID NO: 340 - protein, 369 aa, synthetic construct
  REGION 1..369: note = Variant of oxalate decarboxylase from Gemmata sp. SH-PL17
MGDPTFMNNVPDHLLADKDLPTFKFALEKSKGKVIGKSSGKEATVVQLPISKGIAGVSMTLEPGAMRELHWHATAAEWAFVLTGHVRTTVIDPQGAAETNDFGPGDVWYFPRGHGHMLECLGDKPAHFILIFDNGYFSEFGTFSITDWIGHTPKALLAKNFGLPESAFDGFPKDEVYFARGAVPPATPAAPLQGRKLPPLTHKYELLEQAPHKVFKGGREWRVDSTRFPISKTVTGVVLDLEPGALRELHWHPNADEWQYVIDGNISVTMFGSHGRYRTEQMEKGDVGYIPQGYGHSIENVGDRPCRVLIGFNTGKYQAIDLSQWIAGNPADVLATNFSKPTSLFEKFPKQDVFIAPGKGQTGHHHHHH

SEQ ID NO: 341 - DNA, 1107 bp, synthetic construct
  misc_feature 1..1107: note = Variant of oxalate decarboxylase from Gemmata sp. SH-PL17
  source 1..1107: mol_type = other DNA
atgggtgatccgacctttatgaataatgtgccagaccatctgctggcggataaagatttgccgacgttcaagtttgccctggaaaagagcaagggcaaagtcattgggaaaagttcgggaaaagaagcaaccgttgttcagttacctatctccaaaggcattgctggtgtgagcatgactcttgaaccgggtgcgatgcgcgaattgcactggcatgccacagcagcagagtgggctttcgtattaaccggccacgtccgtacgacggtgatcgatccacaaggtgcggccgaaaccaacgactttggaccgggcgacgtgtggtattttcctcgcggtcatgggcacatgctggaatgcctgggcgataaaccggcgcatttcattctgatcttcgataacggctacttctcagagtttggcaccttctctattactgactggatcggtcacacaccgaaaccgcttctcgccaagaactttggtctgcccgaatcggcttttgatgggtttcccaaaaaagaggtctattttgcacgtggcgcggttccaccagccacccctgcagcgcctttacagggactgaagttgccaccactcacgcataaatacgaactcctcgaacaagctcctcataaagttttcaaaggtggtcgtgaatggcgcgtggatagcacgcgttttcccatttccaagactgtaaccggcgttgttcttgatttggaacccggcgcgttacgcgagcttcactggcatcctaatgctgacgagtggcaatatgtgatcgatggcaacattagtgtgacgatgttcggttctcatggccgttaccgcaccgaacagatggagaagggtgatgtcgggtatattccacaggggtatggccacagcatcgaaaatgtgggagatcgtccttgtcgcgtcttgattggctttaacacaggtaactaccaagcgatcgacttatcacagtggattgcaggtaatcccgcggatgttcttgccacgaacttctccaaacccaccagcctctttgaaaagttcccaaaacaggacgtgtttattgctcctggcaagggccaaactggccaccatcaccatcaccat

SEQ ID NO: 342 - protein, 369 aa, synthetic construct
  REGION 1..369: note = Variant of oxalate decarboxylase from Gemmata sp. SH-PL17
MGDPTFMNNVPDHLLADKDLPTFKFALEKSKGKVIGKSSGKEATVVQLPISKGIAGVSMTLEPGAMRELHWHATAAEWAFVLTGHVRTTVIDPQGAAETNDFGPGDVWYFPRGHGHMLECLGDKPAHFILIFDNGYFSEFGTFSITDWIGHTPKPLLAKNFGLPESAFDGFPKKEVYFARGAVPPATPAAPLQGLKLPPLTHKYELLEQAPHKVFKGGREWRVDSTRFPISKTVTGVVLDLEPGALRELHWHPNADEWQYVIDGNISVTMFGSHGRYRTEQMEKGDVGYIPQGYGHSIENVGDRPCRVLIGFNTGNYQAIDLSQWIAGNPADVLATNFSKPTSLFEKFPKQDVFIAPGKGQTGHHHHHH

SEQ ID NO: 343 - DNA, 1107 bp, synthetic construct
  misc_feature 1..1107: note = Variant of oxalate decarboxylase from Gemmata sp. SH-PL17
  source 1..1107: mol_type = other DNA
atgggtgatccgacctttatgaataatgtgccagaccatctgctggcggataaagatttgccgacgttcaagtttgccctggaaaagagcaagggcaaagtcattgggaaaagttcgggaaaagaagcaaccgttgttcagttacctatctccaaaggcattgctggtgtgagcatgactcttgaaccgggtgcgatgcgcgaattgcactggcatgccacagcagcagagtgggctttcgtattaaccggccacgtccgtacgacggtgatcgatccacaaggtgcggccgaaaccaacgactttggaccgggcgacgtgtggtattttcctcgcggtcatgggcacatgctggaatgcctgggcgataaaccggcgcatttcattctgatcttcgataacggctacttctcagagtttggcaccttctctattactgactggatcggtcacacacagaaagcgcttctcgccaagaactttggtctgcccgaatcggcttttgatgggtttcccaaagacgaggtctattttgcacgtggcgcggttccaccagccacccctgcagcgcctttacagggacgcaaattgccaccactcacgcataaatacgaactcctcgaacaagctcctcataaagttttcaaaggtggtcgtgaatggcgcgtggatagcacccgttttcccatttccaagactgtaaccggcgttgttcttgatttggaacccggcgcgttacgcgagcttcactggcatcctaatgctgacgagtggcaatatgtgatcgatggcaacattagtgtgacgatgttcggttctcatggccgttaccgcaccgaacagatggagaaaggtgatgtcgggtatattccacaggggtatggccacagcatcgaaaatgtgggagatcgtccttgtcgcgtcttgattggctttaacacaggtaactaccaagcgatcgacttatcacagtggattgcaggtaatcccgcggatgttcttgccacgaacttctccaaacccaccagcctctttgaaaagttcccaaaacaggacgtgtttattgctcctggcaagggccaaactggccaccatcaccatcaccat

SEQ ID NO: 344 - protein, 369 aa, synthetic construct
  REGION 1..369: note = Variant of oxalate decarboxylase from Gemmata sp. SH-PL17
MGDPTFMNNVPDHLLADKDLPTFKFALEKSKGKVIGKSSGKEATVVQLPISKGIAGVSMTLEPGAMRELHWHATAAEWAFVLTGHVRTTVIDPQGAAETNDFGPGDVWYFPRGHGHMLECLGDKPAHFILIFDNGYFSEFGTFSITDWIGHTQKALLAKNFGLPESAFDGFPKDEVYFARGAVPPATPAAPLQGRKLPPLTHKYELLEQAPHKVFKGGREWRVDSTRFPISKTVTGVVLDLEPGALRELHWHPNADEWQYVIDGNISVTMFGSHGRYRTEQMEKGDVGYIPQGYGHSIENVGDRPCRVLIGFNTGNYQAIDLSQWIAGNPADVLATNFSKPTSLFEKFPKQDVFIAPGKGQTGHHHHHH

SEQ ID NO: 345 - DNA, 1107 bp, synthetic construct
  misc_feature 1..1107: note = Variant of oxalate decarboxylase from Gemmata sp. SH-PL17
  source 1..1107: mol_type = other DNA
atgggtgatccgacctttatgaataatgtgccagaccatctgctggcggataaagatttgccgacgttcaagtttgcactggaaaagagcaagggcaaagtcattgggaaaagttcgggaaaagaagcaaccgttgttcagttacctatctccaaaggcattgctggtgtgagcatgactcttgaaccgggtgcgatgcgcgaattgcactggcatgccacagcagcagagtgggctttcgtattaaccggccacgtccgtacgacggtgatcgatccacaaggtgcggccgaaaccaacgactttggaccgggcgacgtgtggtattttcctcgcggtcatgggcacatgctggaatgcctgggcgataaaccggcgcatttcattctgatcttcgataacggctacttctcagagtttggcaccttctctattactgactggatcggtcacacaccgaaagcgcttctcgccaagaactttggtctgcccgaatcggcttttgatgggtttcccaaaaaagaggtctattttgcacgtggcgcggttccaccagccacccctgcagcgcctttacagggactgaagttgccaccactcacgcataaatacgaactcctcgaacaagaacctcataaagttttcaaaggtggtcgtgaatggcgcgtggatagcacgcgttttcccatttccaagactgtaaccggcgttgttcttgatttggaacccggcgcgttacgcgagcttcactggcatcctaatgctgacgagtggcaatatgtgatcgatggcaacattagtgtgacgatgttcggttctcatggccgttaccgcaccgaacagatggaggcgggtgatgtcgggtatattccacaggggtatggccacagcatcgaaaatgtgggagatcgtccttgtcgcgtcttgattggctttaacacaggtaactaccaagcgatcgacttatcacagtggattgcaggtaatcccgcggatgttcttgccacgaacttctccaaacccaccagcctctttgaaaagttcccaaaacaggacgtgtttattgctcctggcaagggccaaactggccaccatcaccatcaccat

SEQ ID NO: 346 - protein, 369 aa, synthetic construct
  REGION 1..369: note = Variant of oxalate decarboxylase from Gemmata sp. SH-PL17
MGDPTFMNNVPDHLLADKDLPTFKFALEKSKGKVIGKSSGKEATVVQLPISKGIAGVSMTLEPGAMRELHWHATAAEWAFVLTGHVRTTVIDPQGAAETNDFGPGDVWYFPRGHGHMLECLGDKPAHFILIFDNGYFSEFGTFSITDWIGHTPKALLAKNFGLPESAFDGFPKKEVYFARGAVPPATPAAPLQGLKLPPLTHKYELLEQEPHKVFKGGREWRVDSTRFPISKTVTGVVLDLEPGALRELHWHPNADEWQYVIDGNISVTMFGSHGRYRTEQMEAGDVGYIPQGYGHSIENVGDRPCRVLIGFNTGNYQAIDLSQWIAGNPADVLATNFSKPTSLFEKFPKQDVFIAPGKGQTGHHHHHH

SEQ ID NO: 347 - DNA, 1107 bp, synthetic construct
  misc_feature 1..1107: note = Variant of oxalate decarboxylase from Gemmata sp. SH-PL17
  source 1..1107: mol_type = other DNA
atgggtgatccgacctttatgaataatgtgccagaccatctgctggcggataaagatttgccgacgttcaagtttgcactggaaaagagcaagggcaaagtcattgggaaaagttcgggaaaagaagcaaccgttgttcagttacctatctccaaaggcattgctggtgtgagcatgactcttgaaccgggtgcgatgcgcgaattgcactggcatgccacagcagcagagtgggctttcgtattaaccggccacgtccgtacgacggtgatcgatccacaaggtgcggccgaaaccaacgactttggaccgggcgacgtgtggtattttcctcgcggtcatgggcacatgctggaatgcctgggcgataaaccggcgcatttcattctgatcttcgataacggctacttctcagagtttggcaccttctctattactgactggatcggtcacacaccgaaagcgcttctcgccaagaactttggtctgcccgaatcggcttttgatgggtttcccaaaaaagaggtctattttgcacgtggcgcggttccaccagccacccctgcagcgcctttacagggactgaagttgccaccactcacgcataaatacgaactcctcgaacaagctcctcataaagttttcaaaggtggtcgtgaatggcgcgtggatagcacccgttttcccatttccaagactgtaaccggcgttgttcttgatttggaacccggcgcgttacgcgagcttcactggcatcctaatgctgacgagtggcaatatgtgatcgatggcaacattagtgtgacgatgttcggttctcatggccgttaccgcaccgaacagatggagaagggtgatgtcgggtatattccacaggggtatggccacagcatcgaaaatgtgggagatcgtccttgtcgcgtcttgattggctttaacacaggtaactaccaagcgatcgacttatcacagtggattgcaggtaatcccgcggatgttcttgccacgaacttctccaaacccaccagcctctttgaaaagttcccaaaacaggacgtgtttattgctcctggcaagggccaaactggccaccatcaccatcaccat

SEQ ID NO: 348 - protein, 369 aa, synthetic construct
  REGION 1..369: note = Variant of oxalate decarboxylase from Gemmata sp. SH-PL17
MGDPTFMNNVPDHLLADKDLPTFKFALEKSKGKVIGKSSGKEATVVQLPISKGIAGVSMTLEPGAMRELHWHATAAEWAFVLTGHVRTTVIDPQGAAETNDFGPGDVWYFPRGHGHMLECLGDKPAHFILIFDNGYFSEFGTFSITDWIGHTPKALLAKNFGLPESAFDGFPKKEVYFARGAVPPATPAAPLQGLKLPPLTHKYELLEQAPHKVFKGGREWRVDSTRFPISKTVTGVVLDLEPGALRELHWHPNADEWQYVIDGNISVTMFGSHGRYRTEQMEKGDVGYIPQGYGHSIENVGDRPCRVLIGFNTGNYQAIDLSQWIAGNPADVLATNFSKPTSLFEKFPKQDVFIAPGKGQTGHHHHHH

SEQ ID NO: 349 - DNA, 1107 bp, synthetic construct
  misc_feature 1..1107: note = Variant of oxalate decarboxylase from Gemmata sp. SH-PL17
  source 1..1107: mol_type = other DNA
atgggtgatccgacctttatgaataatgtgccagaccatctgctggcggataaagatttgccgacgttcaagtttgccctggaaaagagcaagggcaaagtcattgggaaaagttcgggaaaagaagcaaccgttgttcagttacctatctccaaaggcattgctggtgtgagcatgactcttgaaccgggtgcgatgcgcgaattgcactggcatgccacagcagcagagtgggctttcgtattaaccggccacgtccgtacgacggtgatcgatccacaaggtgcggccgaaaccaacgactttggaccgggcgacgtgtggtattttcctcgcggtcatgggcacatgctggaatgcctgggcgataaaccggcgcatttcattctgatcttcgataacggctacttctcagagtttggcaccttctctattactgactggatcggtcacacatcgaaagcgcttctcgccaagaactttggtctgcccgaatcggcttttgatgggtttcccaaagacgaggtctattttgcacgtggcgcggttccaccagccacccctgcagcgcctttacagggacgcaaattgccaccactcacgcataaatacgaactcctcgaacaagctcctcataaagttttcaaaggtggtcgtgaatggcgcgtggatagcacccgttttcccatttccaagactgtaaccggcgttgttcttgatttggaacccggcgcgttacgcgagcttcactggcatcctaatgctgacgagtggcaatatgtgatcgatggcaacattagtgtgacgatgttcggttctcatggccgttaccgcaccgaacagatggagaaaggtgatgtcgggtatattccacaggggtatggccacagcatcgaaaatgtgggagatcgtccttgtcgcgtcttgattggctttaacacaggtaactaccaagcgatcgacttatcacagtggattgcaggtaatcccgcggatgttcttgccacgaacttctccaaacccaccagcctctttgaaaagttcccaaaacaggacgtgtttattgctcctggcaagggccaaactggccaccatcaccatcaccat

SEQ ID NO: 350 - protein, 369 aa, synthetic construct
  REGION 1..369: note = Variant of oxalate decarboxylase from Gemmata sp. SH-PL17
MGDPTFMNNVPDHLLADKDLPTFKFALEKSKGKVIGKSSGKEATVVQLPISKGIAGVSMTLEPGAMRELHWHATAAEWAFVLTGHVRTTVIDPQGAAETNDFGPGDVWYFPRGHGHMLECLGDKPAHFILIFDNGYFSEFGTFSITDWIGHTSKALLAKNFGLPESAFDGFPKDEVYFARGAVPPATPAAPLQGRKLPPLTHKYELLEQAPHKVFKGGREWRVDSTRFPISKTVTGVVLDLEPGALRELHWHPNADEWQYVIDGNISVTMFGSHGRYRTEQMEKGDVGYIPQGYGHSIENVGDRPCRVLIGFNTGNYQAIDLSQWIAGNPADVLATNFSKPTSLFEKFPKQDVFIAPGKGQTGHHHHHH

SEQ ID NO: 351 - DNA, 1107 bp, synthetic construct
  misc_feature 1..1107: note = Variant of oxalate decarboxylase from Gemmata sp. SH-PL17
  source 1..1107: mol_type = other DNA
atgggtgatccgacctttatgaataatgtgccagaccatctgctggcggataaagatttgccgacgttcaagtttgccctggaaaagagcaagggcaaagtcattgggaaaagttcgggaaaagaagcaaccgttgttcagttacctatctccaaaggcattgctggtgtgagcatgactcttgaaccgggtgcgatgcgcgaattgcactggcatgccacagcagcagagtgggctttcgtattaaccggccacgtccgtacgacggtgatcgatccacaaggtgcggccgaaaccaacgactttggaccgggcgacgtgtggtattttcctcgcggtcatgggcacatgctggaatgcctgggcgataaaccggcgcatttcattctgatcttcgataacggctacttctcagagtttggcaccttctctattactgactggatcggtcacacaccgaaagcgcttctcgccaagaactttggtctgcccgaatcggcttttgatgggtttcccaaagacgaggtctattttgcacgtggcgcggttccaccagccacccctgcagcgcctttacagggacgcaaattgccaccactcacgcataaatacgaactcctcgaacaagctccttttaaagttttcaaaggtggtcgtgaatggcgcgtggatagcacccgttttcccatttccaagactgtaaccggcgttgttcttgatttggaacccggcgcgttacgcgagcttcactggcatcctaatgctgacgagtggcaatatgtgatcgatggcaacattagtgtgacgatgttcggttctcatggccgttaccgcaccgaacagatggagaaaggtgatgtcgggtatattccacaggggtatggccacagcatcgaaaatgtgggagatcgtccttgtcgcgtcttgattggctttaacacaggtaactaccaagcgatcgacttatcacagtggattgcaggtaatcccgcggatgttcttgccacgaacttctccaaacccaccagcctctttgaaaagttcccaaaacaggacgtgtttattgctcctggcaagggccaaactggccaccatcaccatcaccat

SEQ ID NO: 352 - protein, 369 aa, synthetic construct
  REGION 1..369: note = Variant of oxalate decarboxylase from Gemmata sp. SH-PL17
MGDPTFMNNVPDHLLADKDLPTFKFALEKSKGKVIGKSSGKEATVVQLPISKGIAGVSMTLEPGAMRELHWHATAAEWAFVLTGHVRTTVIDPQGAAETNDFGPGDVWYFPRGHGHMLECLGDKPAHFILIFDNGYFSEFGTFSITDWIGHTPKALLAKNFGLPESAFDGFPKDEVYFARGAVPPATPAAPLQGRKLPPLTHKYELLEQAPFKVFKGGREWRVDSTRFPISKTVTGVVLDLEPGALRELHWHPNADEWQYVIDGNISVTMFGSHGRYRTEQMEKGDVGYIPQGYGHSIENVGDRPCRVLIGFNTGNYQAIDLSQWIAGNPADVLATNFSKPTSLFEKFPKQDVFIAPGKGQTGHHHHHH

SEQ ID NO: 353 - DNA, 1107 bp, synthetic construct
  misc_feature 1..1107: note = Variant of oxalate decarboxylase from Gemmata sp. SH-PL17
  source 1..1107: mol_type = other DNA
atgggtgatccgacctttatgaataatgtgccagaccatctgctggcggataaagatttgccgacgttcaagtttgccctggaaaagagcaagggcaaagtcattgggtgtagttcgggaaaagaagcaaccgttgttcagttacctatctccaaaggcattgctggtgtgagcatgactcttgaaccgggtgcgatgcgcgaattgcactggcatgccacagcagcagagtgggctttcgtattaaccggccacgtccgtacgacggtgatcgatccacaaggtgcggccgaaaccaacgactttggaccgggcgacgtgtggtattttcctcgcggtcatgggcacatgctggaatgcctgggcgataaaccggcgcatttcattctgatcttcgataacggctacttctcagagtttggcaccttctctattactgactggatcggtcacacaccgaaagcgcttctcgccaagaactttggtctgcccgaatcggcttttgatgggtttcccaaagacgaggtctattttgcacgtggcgcggttccaccagccacccctgcagcgcctttacagggacgcaaattgccaccactcacgcataaatacgaactcctcgaacaagctcctcataaagttttcaaaggtggtcgtgaatggcgcgtggatagcacccgttttcccatttccaagactgtaaccggcgttgttcttgatttggaacccggcgcgttacgcgagcttcactggcatcctaatgctgacgagtggcaatatgtgatcgatggcaacattagtgtgacgatgttcggttctcatggccgttaccgcaccgaacagatggagaaaggtgatgtcgggtatattccacaggggtatggccacagcatcgaaaatgtgggagatcgtccttgtcgcgtcttgattggctttaacacaggtaactaccaagcgatcgacttatcacagtggattgcaggtaatcccgcggatgttcttgccacgaacttctccaaacccaccagcctctttgaaaagttcccaaaacaggacgtgtttattgctcctggcaagggccaaactggccaccatcaccatcaccat

SEQ ID NO: 354 - protein, 369 aa, synthetic construct
  REGION 1..369: note = Variant of oxalate decarboxylase from Gemmata sp. SH-PL17
MGDPTFMNNVPDHLLADKDLPTFKFALEKSKGKVIGCSSGKEATVVQLPISKGIAGVSMTLEPGAMRELHWHATAAEWAFVLTGHVRTTVIDPQGAAETNDFGPGDVWYFPRGHGHMLECLGDKPAHFILIFDNGYFSEFGTFSITDWIGHTPKALLAKNFGLPESAFDGFPKDEVYFARGAVPPATPAAPLQGRKLPPLTHKYELLEQAPHKVFKGGREWRVDSTRFPISKTVTGVVLDLEPGALRELHWHPNADEWQYVIDGNISVTMFGSHGRYRTEQMEKGDVGYIPQGYGHSIENVGDRPCRVLIGFNTGNYQAIDLSQWIAGNPADVLATNFSKPTSLFEKFPKQDVFIAPGKGQTGHHHHHH

SEQ ID NO: 355 - DNA, 1107 bp, synthetic construct
  misc_feature 1..1107: note = Variant of oxalate decarboxylase from Gemmata sp. SH-PL17
  source 1..1107: mol_type = other DNA
atgggtgatccgacctttatgaataatgtgccagaccatctgctggcggataaagatttgccgacgttcaagtttgccctggaaaagagcaagggcaaagtcattgggaaaagttcgggaaaagaagcaaccgttgttcagttacctatctccaaaggcattgctggtgtgagcatgactcttgaaccgggtgcgatgcgcgaattgcactggcatgccacagcagcagagtgggctttcgtattaaccggccacgtccgtacgacggtgatcgatccacaaggtgcggccgaaaccaacgactttggaccgggcgacgtgtggtattttcctcgcggtcatgggcacatgctggaatgcctgggcgataaaccggcgcatttcattctgatcttcgataacggctacttctcagagtttggcaccttctctattactgactggatcggtcacacaccgaaagcgcttctcgccaagaactttggtctgcccgaatcggcttttgatgggtttcccaaagacgaggtctattttgcacgtggcgcggttccaccagccacccctgcagcgcctttacagggacgcaaattgccaccactcacgcataaatacgaactcctcgaacaagctcctgttaaagttttcaaaggtggtcgtgaatggcgcgtggatagcacccgttttcccatttccaagactgtaaccggcgttgttcttgatttggaacccggcgcgttacgcgagcttcactggcatcctaatgctgacgagtggcaatatgtgatcgatggcaacattagtgtgacgatgttcggttctcatggccgttaccgcaccgaacagatggagaaaggtgatgtcgggtatattccacaggggtatggccacagcatcgaaaatgtgggagatcgtccttgtcgcgtcttgattggctttaacacaggtaactaccaagcgatcgacttatcacagtggattgcaggtaatcccgcggatgttcttgccacgaacttctccaaacccaccagcctctttgaaaagttcccaaaacaggacgtgtttattgctcctggcaagggccaaactggccaccatcaccatcaccat

SEQ ID NO: 356 - protein, 369 aa, synthetic construct
  REGION 1..369: note = Variant of oxalate decarboxylase from Gemmata sp. SH-PL17
MGDPTFMNNVPDHLLADKDLPTFKFALEKSKGKVIGKSSGKEATVVQLPISKGIAGVSMTLEPGAMRELHWHATAAEWAFVLTGHVRTTVIDPQGAAETNDFGPGDVWYFPRGHGHMLECLGDKPAHFILIFDNGYFSEFGTFSITDWIGHTPKALLAKNFGLPESAFDGFPKDEVYFARGAVPPATPAAPLQGRKLPPLTHKYELLEQAPVKVFKGGREWRVDSTRFPISKTVTGVVLDLEPGALRELHWHPNADEWQYVIDGNISVTMFGSHGRYRTEQMEKGDVGYIPQGYGHSIENVGDRPCRVLIGFNTGNYQAIDLSQWIAGNPADVLATNFSKPTSLFEKFPKQDVFIAPGKGQTGHHHHHH

SEQ ID NO: 357 - DNA, 1107 bp, synthetic construct
  misc_feature 1..1107: note = Variant of oxalate decarboxylase from Gemmata sp. SH-PL17
  source 1..1107: mol_type = other DNA
atgggtgatccgacctttatgaataatgtgccagaccatctgctggcggataaagatttgccgacgttcaagtttgcactggaaaagagcaagggcaaagtcattgggaaaagttcgggaaaagaagcaaccgttgttcagttacctatctccaaaggcattgctggtgtgagcatgactcttgaaccgggtgcgatgcgcgaattgcactggcatgccacagcagcagagtgggctttcgtattaaccggccacgtccgtacgacggtgatcgatccacaaggtgcggccgaaaccaacgactttggaccgggcgacgtgtggtattttcctcgcggtcatgggcacatgctggaatgcctgggcgatgcaccggcgcatttcattctgatcttcgataacggctacttctcagagtttggcaccttctctattactgactggatcggtcacacaccgaaagcgcttctcgccaagaactttggtctgcccgaatcggcttttgatgggtttcccaaaaaagaggtctattttgcacgtggtgcggttccaccagccacccctgcagcgcctttacagggactgaagttgccaccactcacgcataaatacgaactcctcgaacaagctcctcataaagttttcaaaggtggtcgtgaatggcgcgtggatagctcgcgttttcccatttccaagactgtaaccggcgttgttcttgatttggaacccggcgcgttacgcgagcttcactggcatcctaatgctgacgagtggcaatatgtgatcgatggcaacattagtgtgacgatgttcggttctcatggccgttaccgcaccgaacagatggaggcgggtgatgtcgggtatattccacaggggtatggccacagcatcgaaaatgtgggagatcgtccttgtcgcgtcttgattggctttaacacaggtaactaccaagcgatcgacttatcacagtggattgcaggtaatcccgcggatgttcttgccacgaacttctccaaacccaccagcctctttgaaaagttcccaaaacaggacgtgtttattgctcctggcaagggccaaactggccaccatcaccatcaccat

SEQ ID NO: 358 - protein, 369 aa, synthetic construct
  REGION 1..369: note = Variant of oxalate decarboxylase from Gemmata sp. SH-PL17
MGDPTFMNNVPDHLLADKDLPTFKFALEKSKGKVIGKSSGKEATVVQLPISKGIAGVSMTLEPGAMRELHWHATAAEWAFVLTGHVRTTVIDPQGAAETNDFGPGDVWYFPRGHGHMLECLGDAPAHFILIFDNGYFSEFGTFSITDWIGHTPKALLAKNFGLPESAFDGFPKKEVYFARGAVPPATPAAPLQGLKLPPLTHKYELLEQAPHKVFKGGREWRVDSSRFPISKTVTGVVLDLEPGALRELHWHPNADEWQYVIDGNISVTMFGSHGRYRTEQMEAGDVGYIPQGYGHSIENVGDRPCRVLIGFNTGNYQAIDLSQWIAGNPADVLATNFSKPTSLFEKFPKQDVFIAPGKGQTGHHHHHH

SEQ ID NO: 359 - DNA, 1107 bp, synthetic construct
  misc_feature 1..1107: note = Variant of oxalate decarboxylase from Gemmata sp. SH-PL17
  source 1..1107: mol_type = other DNA
atgggtgatccgacctttatgaataatgtgccagaccatctgctggcggataaagatttgccgacgttcaagtttgccctggaaaagagcaagggcaaagtcattgggaaaagttcgggaaaagaagcaaccgttgttcagttacctatctccaaaggcattgctggtgtgagcatgactcttgaaccgggtgcgatgcgcgaattgcactggcatgccacagcagcagagtgggctttcgtattaaccggccacgtccgtacgacggtgatcgatccacaaggtgcggccgaaaccaacgactttggaccgggcgacgtgtggtattttcctcgcggtcatgggcacatgctggaatgcctgggcgataaaccggcgcatttcattctgatcttcgataacggctacttctcagagtttggcaccttctctattactgactggatcggtcacacaccgaaagcgcttctcgccaagaactttggtctgcccgaatcggcttttgatgggtttcccaaagacgagctgtattttgcacgtggcgcggttccaccagccacccctgcagcgcctttacagggacgcaaattgccaccactcacgcataaatacgaactcctcgaacaagctcctcataaagttttcaaaggtggtcgtgaatggcgcgtggatagcacccgttttcccatttccaagactgtaaccggcgttgttcttgatttggaacccggcgcgttacgcgagcttcactggcatcctaatgctgacgagtggcaatatgtgatcgatggcaacattagtgtgacgatgttcggttctcatggccgttaccgcaccgaacagatggagaaaggtgatgtcgggtatattccacaggggtatggccacagcatcgaaaatgtgggagatcgtccttgtcgcgtcttgattggctttaacacaggtaactaccaagcgatcgacttatcacagtggattgcaggtaatcccgcggatgttcttgccacgaacttctccaaacccaccagcctctttgaaaagttcccaaaacaggacgtgtttattgctcctggcaagggccaaactggccaccatcaccatcaccat

SEQ ID NO: 360 - protein, 369 aa, synthetic construct
  REGION 1..369: note = Variant of oxalate decarboxylase from Gemmata sp. SH-PL17
MGDPTFMNNVPDHLLADKDLPTFKFALEKSKGKVIGKSSGKEATVVQLPISKGIAGVSMTLEPGAMRELHWHATAAEWAFVLTGHVRTTVIDPQGAAETNDFGPGDVWYFPRGHGHMLECLGDKPAHFILIFDNGYFSEFGTFSITDWIGHTPKALLAKNFGLPESAFDGFPKDELYFARGAVPPATPAAPLQGRKLPPLTHKYELLEQAPHKVFKGGREWRVDSTRFPISKTVTGVVLDLEPGALRELHWHPNADEWQYVIDGNISVTMFGSHGRYRTEQMEKGDVGYIPQGYGHSIENVGDRPCRVLIGFNTGNYQAIDLSQWIAGNPADVLATNFSKPTSLFEKFPKQDVFIAPGKGQTGHHHHHH

SEQ ID NO: 361 - DNA, 1107 bp, synthetic construct
  misc_feature 1..1107: note = Variant of oxalate decarboxylase from Gemmata sp. SH-PL17
  source 1..1107: mol_type = other DNA
atgggtgatccgacctttatgaataatgtgccagaccatctgctgtcggataaagatttgccgacgttcaagtttgcactggaaaagagcaagggcaaagtcattgggaaaagttcgggaaaagaagcaaccgttgttcagttacctatctccaaaggcattgctggtgtgagcatgactcttgaaccgggtgcgatgcgcgaattgcactggcatgccacagcagcagagtgggctttcgtattaaccggccacgtccgtacgacggtgatcgatccacaaggtgcggccgaaaccaacgactttggaccgggcgacgtgtggtattttcctcgcggtcatgggcacatgctggaatgcctgggcgataaaccggcgcatttcattctgatcttcgataacggctacttctcagagtttggcaccttctctattactgactggatcggtcacacaccgaaaccgcttctcgccaagaactttggtctgcccgaatcggcttttgatgggtttcccaaaaaagaggtctattttgcacgtggcgcggttccaccagccacccctgcagcgcctttacagggactggtattgccaccactcacgcacaaatacgaactcctcgaacaagctcctcataaagttttcaaaggtggtcgtgaatggcgcgtggatagctcgcgttttcccatttccaagactgtaaccggcgttgttcttgatttggaacccggcgcgttacgcgagcttcactggcatcctaatgctgacgagtggcaatatgtgatcgatggcaacattagtgtgacgatgttcggttctcatggccgttaccgcaccgaacagatggaggcgggtgatgtcgggtatattccacaggggtatggccacagcatcgaaaatgtgggagatcgtccttgtcgcgtcttgattggctttaacacaggtaactaccaagcgatcgacttatcacagtggattgcaggtaatcccgcggatgttcttgccacgaacttctccaaacccaccagcctctttgaaaagttcccaaaacaggacgtgtttattgctcctggcaagggccaaactggccaccatcaccatcaccat

SEQ ID NO: 362 - protein, 369 aa, synthetic construct
  REGION 1..369: note = Variant of oxalate decarboxylase from Gemmata sp. SH-PL17
MGDPTFMNNVPDHLLSDKDLPTFKFALEKSKGKVIGKSSGKEATVVQLPISKGIAGVSMTLEPGAMRELHWHATAAEWAFVLTGHVRTTVIDPQGAAETNDFGPGDVWYFPRGHGHMLECLGDKPAHFILIFDNGYFSEFGTFSITDWIGHTPKPLLAKNFGLPESAFDGFPKKEVYFARGAVPPATPAAPLQGLVLPPLTHKYELLEQAPHKVFKGGREWRVDSSRFPISKTVTGVVLDLEPGALRELHWHPNADEWQYVIDGNISVTMFGSHGRYRTEQMEAGDVGYIPQGYGHSIENVGDRPCRVLIGFNTGNYQAIDLSQWIAGNPADVLATNFSKPTSLFEKFPKQDVFIAPGKGQTGHHHHHH

SEQ ID NO: 363 - DNA, 1107 bp, synthetic construct
  misc_feature 1..1107: note = Variant of oxalate decarboxylase from Gemmata sp. SH-PL17
  source 1..1107: mol_type = other DNA
atgggtgatccgacctttatgaataatcagccagaccatctgctggcggataaagatttgccgacgttcaagtttgccctggaaaagagcaagggcaaagtcattgggaaaagttcgggaaaagaagcaaccgttgttcagttacctatctccaaaggcattgctggtgtgagcatgactcttgaaccgggtgcgatgcgcgaattgcactggcatgccacagcagcagagtgggctttcgtattaaccggccacgtccgtacgacggtgatcgatccacaaggtgcggccgaaaccaacgactttggaccgggcgacgtgtggtattttcctcgcggtcatgggcacatgctggaatgcctgggcgataaaccggcgcatttcattctgatcttcgataacggctacttctcagagtttggcaccttctctattactgactggatcggtcacacaccgaaagcgcttctcgccaagaactttggtctgcccgaatcggcttttgatgggtttcccaaagacgaggtctattttgcacgtggcgcggttccaccagccacccctgcagcgcctttacagggacgcaaattgccaccactcacgcataaatacgaactcctcgaacaagctcctcataaagttttcaaaggtggtcgtgaatggcgcgtggatagcacccgttttcccatttccaagactgtaaccggcgttgttcttgatttggaacccggcgcgttacgcgagcttcactggcatcctaatgctgacgagtggcaatatgtgatcgatggcaacattagtgtgacgatgttcggttctcatggccgttaccgcaccgaacagatggagaaaggtgatgtcgggtatattccacaggggtatggccacagcatcgaaaatgtgggagatcgtccttgtcgcgtcttgattggctttaacacaggtaactaccaagcgatcgacttatcacagtggattgcaggtaatcccgcggatgttcttgccacgaacttctccaaacccaccagcctctttgaaaagttcccaaaacaggacgtgtttattgctcctggcaagggccaaactggccaccatcaccatcaccat

SEQ ID NO: 364 - protein, 369 aa, synthetic construct
  REGION 1..369: note = Variant of oxalate decarboxylase from Gemmata sp. SH-PL17
MGDPTFMNNQPDHLLADKDLPTFKFALEKSKGKVIGKSSGKEATVVQLPISKGIAGVSMTLEPGAMRELHWHATAAEWAFVLTGHVRTTVIDPQGAAETNDFGPGDVWYFPRGHGHMLECLGDKPAHFILIFDNGYFSEFGTFSITDWIGHTPKALLAKNFGLPESAFDGFPKDEVYFARGAVPPATPAAPLQGRKLPPLTHKYELLEQAPHKVFKGGREWRVDSTRFPISKTVTGVVLDLEPGALRELHWHPNADEWQYVIDGNISVTMFGSHGRYRTEQMEKGDVGYIPQGYGHSIENVGDRPCRVLIGFNTGNYQAIDLSQWIAGNPADVLATNFSKPTSLFEKFPKQDVFIAPGKGQTGHHHHHH

SEQ ID NO: 365 - DNA, 1107 bp, synthetic construct
  misc_feature 1..1107: note = Variant of oxalate decarboxylase from Gemmata sp. SH-PL17
  source 1..1107: mol_type = other DNA
atgggtgatccgacctttatgaataatgtgccagaccatctgctggcggataaagatttgccgacgttcaagtttgccctggaaaagagcaagggcaaagtcattgggaaaagttcgggaaaagaagcaaccgttgttcagttacctatctccaaaggcattgctggtgtgagcatgactcttgaaccgggtgcgatgcgcgaattgcactggcatgccacagcagcagagtgggctttcgtattaaccggccacgtccgtacgacggtgatcgatccacaaggtgcggccgaaaccaacgactttggaccgggcgacgtgtggtattttcctcgcggtcatgggcacatgctggaatgcctgggcgataaaccggcgcatttcattctgatcttcgataacggctacttctcagagtttggcaccttctctattactgactggatcggtcacacaccgaaagcgcttctcgccaagaactttggtctgcccgaatcggcttttggcgggtttcccgttgacgaggtctattttgcacgtggcgcggtcccaccagccacccctgcagcgcctttacagggacgcaaattgccaccactcacgcataaatacgaactcctcgaacaagctcctcataaagttttcaagggtggtcgtgaatggcgcgtggatagcacccgttttcccatttccaagactgtaaccggcgttgttcttgatttggaacccggcgcgttacgcgagcttcactggcatcctaatgctgacgagtggcaatatgtgatcgatggcaacattagtgtgacgatgttcggttctcatggccgttaccgcaccgaacagatggagaaaggtgatgtcgggtatattccacaggggtatggccacagcatcgaaaatgtgggagatcgtccttgtcgcgtcttgattggctttaacacaggtaactaccaagcgatcgacttatcacagtggattgcaggtaatcccgcggatgttcttgccacgaacttcagcaaacccaccagcctctttgaaaagttcccaaaacaggacgtgtttattgctcctggcaaaggccaaactggccaccatcaccatcaccat

SEQ ID NO: 366 - protein, 369 aa, synthetic construct
  REGION 1..369: note = Variant of oxalate decarboxylase from Gemmata sp. SH-PL17
MGDPTFMNNVPDHLLADKDLPTFKFALEKSKGKVIGKSSGKEATVVQLPISKGIAGVSMTLEPGAMRELHWHATAAEWAFVLTGHVRTTVIDPQGAAETNDFGPGDVWYFPRGHGHMLECLGDKPAHFILIFDNGYFSEFGTFSITDWIGHTPKALLAKNFGLPESAFGGFPVDEVYFARGAVPPATPAAPLQGRKLPPLTHKYELLEQAPHKVFKGGREWRVDSTRFPISKTVTGVVLDLEPGALRELHWHPNADEWQYVIDGNISVTMFGSHGRYRTEQMEKGDVGYIPQGYGHSIENVGDRPCRVLIGFNTGNYQAIDLSQWIAGNPADVLATNFSKPTSLFEKFPKQDVFIAPGKGQTGHHHHHH

SEQ ID NO: 367 - DNA, 1107 bp, synthetic construct
  misc_feature 1..1107: note = Variant of oxalate decarboxylase from Gemmata sp. SH-PL17
  source 1..1107: mol_type = other DNA
atgggtgatccgacctttatgaataatgtgccagaccatctgctggcggataaagatttgccgacgttcaagtttgccctggaaaagagcaagggcaaagtcattgggaaaagttcgggaaaagaagcaaccgttgttcagttacctatctccaaaggcattgctggtgtgagcatgactcttgaaccgggtgcgatgcgcgaattgcactggcatgccacagcagcagagtgggctttcgtattaaccggccacgtccgtacgacggtgatcgatccacaaggtgcggccgaaaccaacgactttggaccgggcgacgtgtggtattttcctcgcggtcatgggcacatgctggaatgcctgggcgataaaccggcgcatttcattctgatcttcgataacggctacttctcagagtttggcaccttctctattactgactggatcggtcacacaccgaaacttcttctcgccaagaactttggtctgcccgaatcggcttttgatgggtttcccaaagacgaggtctattttgcacgtggcgcggttccaccagccacccctgcagcgcctttacagggacgcaaattgccaccactcacgcataaatacgaactcctcgaacaagctcctcataaagttttcaaaggtggtcgtgaatggcgcgtggatagcacccgttttcccatttccaagactgtaaccggcgttgttcttgatttggaacccggcgcgttacgcgagcttcactggcatcctaatgctgacgagtggcaatatgtgatcgatggcaacattagtgtgacgatgttcggttctcatggccgttaccgcaccgaacagatggagaaaggtgatgtcgggtatattccacaggggtatggccacagcatcgaaaatgtgggagatcgtccttgtcgcgtcttgattggctttaacacaggtaactaccaagcgatcgacttatcacagtggattgcaggtaatcccgcggatgttcttgccacgaacttctccaaacccaccagcctctttgaaaagttcccaaaacaggacgtgtttattgctcctggcaagggccaaactggccaccatcaccatcaccat

SEQ ID NO: 368 - protein, 369 aa, synthetic construct
  REGION 1..369: note = Variant of oxalate decarboxylase from Gemmata sp. SH-PL17
MGDPTFMNNVPDHLLADKDLPTFKFALEKSKGKVIGKSSGKEATVVQLPISKGIAGVSMTLEPGAMRELHWHATAAEWAFVLTGHVRTTVIDPQGAAETNDFGPGDVWYFPRGHGHMLECLGDKPAHFILIFDNGYFSEFGTFSITDWIGHTPKLLLAKNFGLPESAFDGFPKDEVYFARGAVPPATPAAPLQGRKLPPLTHKYELLEQAPHKVFKGGREWRVDSTRFPISKTVTGVVLDLEPGALRELHWHPNADEWQYVIDGNISVTMFGSHGRYRTEQMEKGDVGYIPQGYGHSIENVGDRPCRVLIGFNTGNYQAIDLSQWIAGNPADVLATNFSKPTSLFEKFPKQDVFIAPGKGQTGHHHHHH

SEQ ID NO: 369 - DNA, 1107 bp, synthetic construct
  misc_feature 1..1107: note = Variant of oxalate decarboxylase from Gemmata sp. SH-PL17
  source 1..1107: mol_type = other DNA
atgggtgatccgacctttatgaataatgtgccagaccatctgctggcggatggggatttgccgacgttcaagtttgccctggaaaagagcaagggcaaagtcattgggaaaagttcgggaaaagaagcaaccgttgttcagttacctatctccaaaggcattgctggtgtgagcatgactcttgaaccgggtgcgatgcgcgaattgcactggcatgccacagcagcagagtgggctttcgtattaaccggccacgtccgtacgacggtgatcgatccacaaggtgcggccgaaaccaacgactttggaccgggcgacgtgtggtattttcctcgcggtcatgggcacatgctggaatgcctgggcgataaaccggcgcatttcattctgatcttcgataacggctacttctcagagtttggcaccttctctattactgactggatcggtcacacaccgaaagcgcttctcgccaagaactttggtctgcccgaatcggcttttgatgggtttcccaaagacgaggtctattttgcacgtggcgcggttccaccagccacccctgcagcgcctttacagggacgcaaattgccaccactcacgcataaatacgaactcctcgaacaagctcctcataaagttttcaaaggtggtcgtgaatggcgcgtggatagcacccgttttcccatttccaagactgtaaccggcgttgttcttgatttggaacccggcgcgttacgcgagcttcactggcatcctaatgctgacgagtggcaatatgtgatcgatggcaacattagtgtgacgatgttcggttctcatggccgttaccgcaccgaacagatggagaaaggtgatgtcgggtatattccacaggggtatggccacagcatcgaaaatgtgggagatcgtccttgtcgcgtcttgattggctttaacacaggtaactaccaagcgatcgacttatcacagtggattgcaggtaatcccgcggatgttcttgccacgaacttctccaaacccaccagcctctttgaaaagttcccaaaacaggacgtgtttattgctcctggcaagggccaaactggccaccatcaccatcaccat

SEQ ID NO: 370 - protein, 369 aa, synthetic construct
  REGION 1..369: note = Variant of oxalate decarboxylase from Gemmata sp. SH-PL17
MGDPTFMNNVPDHLLADGDLPTFKFALEKSKGKVIGKSSGKEATVVQLPISKGIAGVSMTLEPGAMRELHWHATAAEWAFVLTGHVRTTVIDPQGAAETNDFGPGDVWYFPRGHGHMLECLGDKPAHFILIFDNGYFSEFGTFSITDWIGHTPKALLAKNFGLPESAFDGFPKDEVYFARGAVPPATPAAPLQGRKLPPLTHKYELLEQAPHKVFKGGREWRVDSTRFPISKTVTGVVLDLEPGALRELHWHPNADEWQYVIDGNISVTMFGSHGRYRTEQMEKGDVGYIPQGYGHSIENVGDRPCRVLIGFNTGNYQAIDLSQWIAGNPADVLATNFSKPTSLFEKFPKQDVFIAPGKGQTGHHHHHH

SEQ ID NO: 371 - DNA, 1107 bp, synthetic construct
  misc_feature 1..1107: note = Variant of oxalate decarboxylase from Gemmata sp. SH-PL17
  source 1..1107: mol_type = other DNA
atgggtgatccgacctttatgaataatgtgccagaccatctgctggcggataaagatttgccgacgttcaagtttgccctggaaaagagcaagggcaaagtcattgggaaaagttcgggaaaagaagcaaccgttgttcagttacctatctccaaaggcattgctggtgtgagcatgctgcttgaaccgggtgcgatgcgcgaattgcactggcatgccacagcagcagagtgggctttcgtattaaccggccacgtccgtacgacggtgatcgatccacaaggtgcggccgaaaccaacgactttggaccgggcgacgtgtggtattttcctcgcggtcatgggcacatgctggaatgcctgggcgataaaccggcgcatttcattctgatcttcgataacggctacttctcagagtttggcaccttctctattactgactggatcggtcacacaccgaaagcgcttctcgccaagaactttggtctgcccgaatcggcttttgatgggtttcccaaagacgaggtctattttgcacgtggcgcggttccaccagccacccctgcagcgcctttacagggacgcaaattgccaccactcacgcataaatacgaactcctcgaacaagctcctcataaagttttcaaaggtggtcgtgaatggcgcgtggatagcacccgttttcccatttccaagactgtaaccggcgttgttcttgatttggaacccggcgcgttacgcgagcttcactggcatcctaatgctgacgagtggcaatatgtgatcgatggcaacattagtgtgacgatgttcggttctcatggccgttaccgcaccgaacagatggagaaaggtgatgtcgggtatattccacaggggtatggccacagcatcgaaaatgtgggagatcgtccttgtcgcgtcttgattggctttaacacaggtaactaccaagcgatcgacttatcacagtggattgcaggtaatcccgcggatgttcttgccacgaacttctccaaacccaccagcctctttgaaaagttcccaaaacaggacgtgtttattgctcctggcaagggccaaactggccaccatcaccatcaccat

SEQ ID NO: 372 - protein, 369 aa, synthetic construct
  REGION 1..369: note = Variant of oxalate decarboxylase from Gemmata sp. SH-PL17
MGDPTFMNNVPDHLLADKDLPTFKFALEKSKGKVIGKSSGKEATVVQLPISKGIAGVSMLLEPGAMRELHWHATAAEWAFVLTGHVRTTVIDPQGAAETNDFGPGDVWYFPRGHGHMLECLGDKPAHFILIFDNGYFSEFGTFSITDWIGHTPKALLAKNFGLPESAFDGFPKDEVYFARGAVPPATPAAPLQGRKLPPLTHKYELLEQAPHKVFKGGREWRVDSTRFPISKTVTGVVLDLEPGALRELHWHPNADEWQYVIDGNISVTMFGSHGRYRTEQMEKGDVGYIPQGYGHSIENVGDRPCRVLIGFNTGNYQAIDLSQWIAGNPADVLATNFSKPTSLFEKFPKQDVFIAPGKGQTGHHHHHH

SEQ ID NO: 373 - DNA, 1107 bp, synthetic construct
  misc_feature 1..1107: note = Variant of oxalate decarboxylase from Gemmata sp. SH-PL17
  source 1..1107: mol_type = other DNA
atgggtgatccgacctttatgaataatgcgccagaccatctgctggcggataaagatttgccgacgttcaagtttgccctggaaaagagcaagggcaaagtcattgggaaaagttcgggaaaagaagcaaccgttgttcagttacctatctccaaaggcattgctggtgtgagcatgactcttgaaccgggtgcgatgcgcgaattgcactggcatgccacagcagcagagtgggctttcgtattaaccggccacgtccgtacgacggtgatcgatccacaaggtgcggccgaaaccaacgactttggaccgggcgacgtgtggtattttcctcgcggtcatgggcacatgctggaatgcctgggcgataaaccggcgcatttcattctgatcttcgataacggctacttctcagagtttggcaccttctctattactgactggatcggtcacacaccgaaagcgcttctcgccaagaactttggtctgcccgaatcggcttttgatgggtttcccaaagacgaggtctattttgcacgtggcgcggttccaccagccacccctgcagcgcctttacagggacgcaaattgccaccactcacgcataaatacgaactcctcgaacaagctcctcataaagttttcaaaggtggtcgtgaatggcgcgtggatagcacccgttttcccatttccaagactgtaaccggcgttgttcttgatttggaacccggcgcgttacgcgagcttcactggcatcctaatgctgacgagtggcaatatgtgatcgatggcaacattagtgtgacgatgttcggttctcatggccgttaccgcaccgaacagatggagaaaggtgatgtcgggtatattccacaggggtatggccacagcatcgaaaatgtgggagatcgtccttgtcgcgtcttgattggctttaacacaggtaactaccaagcgatcgacttatcacagtggattgcaggtaatcccgcggatgttcttgccacgaacttctccaaacccaccagcctctttgaaaagttcccaaaacaggacgtgtttattgctcctggcaagggccaaactggccaccatcaccatcaccat

SEQ ID NO: 374 - protein, 369 aa, synthetic construct
  REGION 1..369: note = Variant of oxalate decarboxylase from Gemmata sp. SH-PL17
MGDPTFMNNAPDHLLADKDLPTFKFALEKSKGKVIGKSSGKEATVVQLPISKGIAGVSMTLEPGAMRELHWHATAAEWAFVLTGHVRTTVIDPQGAAETNDFGPGDVWYFPRGHGHMLECLGDKPAHFILIFDNGYFSEFGTFSITDWIGHTPKALLAKNFGLPESAFDGFPKDEVYFARGAVPPATPAAPLQGRKLPPLTHKYELLEQAPHKVFKGGREWRVDSTRFPISKTVTGVVLDLEPGALRELHWHPNADEWQYVIDGNISVTMFGSHGRYRTEQMEKGDVGYIPQGYGHSIENVGDRPCRVLIGFNTGNYQAIDLSQWIAGNPADVLATNFSKPTSLFEKFPKQDVFIAPGKGQTGHHHHHH

SEQ ID NO: 375 - DNA, 1107 bp, synthetic construct
  misc_feature 1..1107: note = Variant of oxalate decarboxylase from Gemmata sp. SH-PL17
  source 1..1107: mol_type = other DNA
atgggtgatccgacctttatgaataatgtgccagaccatctgctggcggatagggatttgccgacgttcaagtttgccctggaaaagagcaagggcaaagtcattgggaaaagttcgggaaaagaagcaaccgttgttcagttacctatctccaaaggcattgctggtgtgagcatgactcttgaaccgggtgcgatgcgcgaattgcactggcatgccacagcagcagagtgggctttcgtattaaccggccacgtccgtacgacggtgatcgatccacaaggtgcggccgaaaccaacgactttggaccgggcgacgtgtggtattttcctcgcggtcatgggcacatgctggaatgcctgggcgataaaccggcgcatttcattctgatcttcgataacggctacttctcagagtttggcaccttctctattactgactggatcggtcacacaccgaaagcgcttctcgccaagaactttggtctgcccgaatcggcttttgatgggtttcccaaagacgaggtctattttgcacgtggcgcggttccaccagccacccctgcagcgcctttacagggacgcaaattgccaccactcacgcataaatacgaactcctcgaacaagctcctcataaagttttcaaaggtggtcgtgaatggcgcgtggatagcacccgttttcccatttccaagactgtaaccggcgttgttcttgatttggaacccggcgcgttacgcgagcttcactggcatcctaatgctgacgagtggcaatatgtgatcgatggcaacattagtgtgacgatgttcggttctcatggccgttaccgcaccgaacagatggagaaaggtgatgtcgggtatattccacaggggtatggccacagcatcgaaaatgtgggagatcgtccttgtcgcgtcttgattggctttaacacaggtaactaccaagcgatcgacttatcacagtggattgcaggtaatcccgcggatgttcttgccacgaacttctccaaacccaccagcctctttgaaaagttcccaaaacaggacgtgtttattgctcctggcaagggccaaactggccaccatcaccatcaccat

SEQ ID NO: 376 - protein, 369 aa, synthetic construct
  REGION 1..369: note = Variant of oxalate decarboxylase from Gemmata sp. SH-PL17
MGDPTFMNNVPDHLLADRDLPTFKFALEKSKGKVIGKSSGKEATVVQLPISKGIAGVSMTLEPGAMRELHWHATAAEWAFVLTGHVRTTVIDPQGAAETNDFGPGDVWYFPRGHGHMLECLGDKPAHFILIFDNGYFSEFGTFSITDWIGHTPKALLAKNFGLPESAFDGFPKDEVYFARGAVPPATPAAPLQGRKLPPLTHKYELLEQAPHKVFKGGREWRVDSTRFPISKTVTGVVLDLEPGALRELHWHPNADEWQYVIDGNISVTMFGSHGRYRTEQMEKGDVGYIPQGYGHSIENVGDRPCRVLIGFNTGNYQAIDLSQWIAGNPADVLATNFSKPTSLFEKFPKQDVFIAPGKGQTGHHHHHH

SEQ ID NO: 377 - DNA, 1107 bp, synthetic construct
  misc_feature 1..1107: note = Variant of oxalate decarboxylase from Gemmata sp. SH-PL17
  source 1..1107: mol_type = other DNA
atgggtgatccgacctttatgaataatgtgccagaccatctgctggcggataaagatttgccgacgttcaagtttgccctggaaaagagcaagggccgggtcattgggaaaagttcgggaaaagaagcaaccgttgttcagttacctatctccaaaggcattgctggtgtgagcatgactcttgaaccgggtgcgatgcgcgaattgcactggcatgccacagcagcagagtgggctttcgtattaaccggccacgtccgtacgacggtgatcgatccacaaggtgcggccgaaaccaacgactttggaccgggcgacgtgtggtattttcctcgcggtcatgggcacatgctggaatgcctgggcgataaaccggcgcatttcattctgatcttcgataacggctacttctcagagtttggcaccttctctattactgactggatcggtcacacaccgaaagcgcttctcgccaagaactttggtctgcccgaatcggcttttgatgggtttcccaaagacgaggtctattttgcacgtggcgcggttccaccagccacccctgcagcgcctttacagggacgcaaattgccaccactcacgcataaatacgaactcctcgaacaagctcctcataaagttttcaaaggtggtcgtgaatggcgcgtggatagcacccgttttcccatttccaagactgtaaccggcgttgttcttgatttggaacccggcgcgttacgcgagcttcactggcatcctaatgctgacgagtggcaatatgtgatcgatggcaacattagtgtgacgatgttcggttctcatggccgttaccgcaccgaacagatggagaaaggtgatgtcgggtatattccacaggggtatggccacagcatcgaaaatgtgggagatcgtccttgtcgcgtcttgattggctttaacacaggtaactaccaagcgatcgacttatcacagtggattgcaggtaatcccgcggatgttcttgccacgaacttctccaaacccaccagcctctttgaaaagttcccaaaacaggacgtgtttattgctcctggcaagggccaaactggccaccatcaccatcaccat

SEQ ID NO: 378 - protein, 369 aa, synthetic construct
  REGION 1..369: note = Variant of oxalate decarboxylase from Gemmata sp. SH-PL17
MGDPTFMNNVPDHLLADKDLPTFKFALEKSKGRVIGKSSGKEATVVQLPISKGIAGVSMTLEPGAMRELHWHATAAEWAFVLTGHVRTTVIDPQGAAETNDFGPGDVWYFPRGHGHMLECLGDKPAHFILIFDNGYFSEFGTFSITDWIGHTPKALLAKNFGLPESAFDGFPKDEVYFARGAVPPATPAAPLQGRKLPPLTHKYELLEQAPHKVFKGGREWRVDSTRFPISKTVTGVVLDLEPGALRELHWHPNADEWQYVIDGNISVTMFGSHGRYRTEQMEKGDVGYIPQGYGHSIENVGDRPCRVLIGFNTGNYQAIDLSQWIAGNPADVLATNFSKPTSLFEKFPKQDVFIAPGKGQTGHHHHHH

SEQ ID NO: 379 - DNA, 1107 bp, synthetic construct
  misc_feature 1..1107: note = Variant of oxalate decarboxylase from Gemmata sp. SH-PL17
  source 1..1107: mol_type = other DNA
atgggtgatccgacctttatgaataatgtgccagaccatctgctggcggataaagatttgccgacgttcaagtttgccctggaaaagagcaagggcaaagtcattgggaaaagttcgggaaaagaagcaaccgttgttcagttacctatctccaaaggcattgctggtgtgagcatgactcttgaaccgggtgcgatgcgcgaattgcactggcatgccacagcagcagagtgggctttcgtattaaccggccacgtccgtacgacggtgatcgatccacaaggtgcggccgaaaccaacgactttggaccgggcgacgtgtggtattttcctcgcggtcatgggcacatgctggaatgcctgggcgataaaccggcgcatttcattctgatcttcgataacggctacttctcagagtttggcaccttctctattactgactggatcggtcacacaccgaaagcgcttctcgccaagaactttggtctgcccgaatcggcttttgatgggtttcccaaagacgaggtctattttgcacgtggcgcggttccaccagccacccctgcagcgcctttacagggacgcaaattgccaccactcacgcataaatacgaactcctcgaacaagctcctgggaaagttttcaaaggtggtcgtgaatggcgcgtggatagcacccgttttcccatttccaagactgtaaccggcgttgttcttgatttggaacccggcgcgttacgcgagcttcactggcatcctaatgctgacgagtggcaatatgtgatcgatggcaacattagtgtgacgatgttcggttctcatggccgttaccgcaccgaacagatggagaaaggtgatgtcgggtatattccacaggggtatggccacagcatcgaaaatgtgggagatcgtccttgtcgcgtcttgattggctttaacacaggtaactaccaagcgatcgacttatcacagtggattgcaggtaatcccgcggatgttcttgccacgaacttctccaaacccaccagcctctttgaaaagttcccaaaacaggacgtgtttattgctcctggcaagggccaaactggccaccatcaccatcaccat

SEQ ID NO: 380 - protein, 369 aa, synthetic construct
  REGION 1..369: note = Variant of oxalate decarboxylase from Gemmata sp. SH-PL17
MGDPTFMNNVPDHLLADKDLPTFKFALEKSKGKVIGKSSGKEATVVQLPISKGIAGVSMTLEPGAMRELHWHATAAEWAFVLTGHVRTTVIDPQGAAETNDFGPGDVWYFPRGHGHMLECLGDKPAHFILIFDNGYFSEFGTFSITDWIGHTPKALLAKNFGLPESAFDGFPKDEVYFARGAVPPATPAAPLQGRKLPPLTHKYELLEQAPGKVFKGGREWRVDSTRFPISKTVTGVVLDLEPGALRELHWHPNADEWQYVIDGNISVTMFGSHGRYRTEQMEKGDVGYIPQGYGHSIENVGDRPCRVLIGFNTGNYQAIDLSQWIAGNPADVLATNFSKPTSLFEKFPKQDVFIAPGKGQTGHHHHHH

SEQ ID NO: 381 - DNA, 1107 bp, synthetic construct
  misc_feature 1..1107: note = Variant of oxalate decarboxylase from Gemmata sp. SH-PL17
  source 1..1107: mol_type = other DNA
atgggtgatccgacctttatgaataataggccagaccatctgctggcggataaagatttgccgacgttcaagtttgccctggaaaagagcaagggcaaagtcattgggaaaagttcgggaaaagaagcaaccgttgttcagttacctatctccaaaggcattgctggtgtgagcatgactcttgaaccgggtgcgatgcgcgaattgcactggcatgccacagcagcagagtgggctttcgtattaaccggccacgtccgtacgacggtgatcgatccacaaggtgcggccgaaaccaacgactttggaccgggcgacgtgtggtattttcctcgcggtcatgggcacatgctggaatgcctgggcgataaaccggcgcatttcattctgatcttcgataacggctacttctcagagtttggcaccttctctattactgactggatcggtcacacaccgaaagcgcttctcgccaagaactttggtctgcccgaatcggcttttgatgggtttcccaaagacgaggtctattttgcacgtggcgcggttccaccagccacccctgcagcgcctttacagggacgcaaattgccaccactcacgcataaatacgaactcctcgaacaagctcctcataaagttttcaaaggtggtcgtgaatggcgcgtggatagcacccgttttcccatttccaagactgtaaccggcgttgttcttgatttggaacccggcgcgttacgcgagcttcactggcatcctaatgctgacgagtggcaatatgtgatcgatggcaacattagtgtgacgatgttcggttctcatggccgttaccgcaccgaacagatggagaaaggtgatgtcgggtatattccacaggggtatggccacagcatcgaaaatgtgggagatcgtccttgtcgcgtcttgattggctttaacacaggtaactaccaagcgatcgacttatcacagtggattgcaggtaatcccgcggatgttcttgccacgaacttctccaaacccaccagcctctttgaaaagttcccaaaacaggacgtgtttattgctcctggcaagggccaaactggccaccatcaccatcaccat

SEQ ID NO: 382 - protein, 369 aa, synthetic construct
  REGION 1..369: note = Variant of oxalate decarboxylase from Gemmata sp. SH-PL17
MGDPTFMNNRPDHLLADKDLPTFKFALEKSKGKVIGKSSGKEATVVQLPISKGIAGVSMTLEPGAMRELHWHATAAEWAFVLTGHVRTTVIDPQGAAETNDFGPGDVWYFPRGHGHMLECLGDKPAHFILIFDNGYFSEFGTFSITDWIGHTPKALLAKNFGLPESAFDGFPKDEVYFARGAVPPATPAAPLQGRKLPPLTHKYELLEQAPHKVFKGGREWRVDSTRFPISKTVTGVVLDLEPGALRELHWHPNADEWQYVIDGNISVTMFGSHGRYRTEQMEKGDVGYIPQGYGHSIENVGDRPCRVLIGFNTGNYQAIDLSQWIAGNPADVLATNFSKPTSLFEKFPKQDVFIAPGKGQTGHHHHHH

SEQ ID NO: 383 - DNA, 1107 bp, synthetic construct
  misc_feature 1..1107: note = Variant of oxalate decarboxylase from Gemmata sp. SH-PL17
  source 1..1107: mol_type = other DNA
atgggtgatccgacctttatgaataatgtgccagaccggctgctggcggataaagatttgccgacgttcaagtttgccctggaaaagagcaagggcaaagtcattgggaaaagttcgggaaaagaagcaaccgttgttcagttacctatctccaaaggcattgctggtgtgagcatgactcttgaaccgggtgcgatgcgcgaattgcactggcatgccacagcagcagagtgggctttcgtattaaccggccacgtccgtacgacggtgatcgatccacaaggtgcggccgaaaccaacgactttggaccgggcgacgtgtggtattttcctcgcggtcatgggcacatgctggaatgcctgggcgataaaccggcgcatttcattctgatcttcgataacggctacttctcagagtttggcaccttctctattactgactggatcggtcacacaccgaaagcgcttctcgccaagaactttggtctgcccgaatcggcttttgatgggtttcccaaagacgaggtctattttgcacgtggcgcggttccaccagccacccctgcagcgcctttacagggacgcaaattgccaccactcacgcataaatacgaactcctcgaacaagctcctcataaagttttcaaaggtggtcgtgaatggcgcgtggatagcacccgttttcccatttccaagactgtaaccggcgttgttcttgatttggaacccggcgcgttacgcgagcttcactggcatcctaatgctgacgagtggcaatatgtgatcgatggcaacattagtgtgacgatgttcggttctcatggccgttaccgcaccgaacagatggagaaaggtgatgtcgggtatattccacaggggtatggccacagcatcgaaaatgtgggagatcgtccttgtcgcgtcttgattggctttaacacaggtaactaccaagcgatcgacttatcacagtggattgcaggtaatcccgcggatgttcttgccacgaacttctccaaacccaccagcctctttgaaaagttcccaaaacaggacgtgtttattgctcctggcaagggccaaactggccaccatcaccatcaccat

SEQ ID NO: 384 - protein, 369 aa, synthetic construct
  REGION 1..369: note = Variant of oxalate decarboxylase from Gemmata sp. SH-PL17
MGDPTFMNNVPDRLLADKDLPTFKFALEKSKGKVIGKSSGKEATVVQLPISKGIAGVSMTLEPGAMRELHWHATAAEWAFVLTGHVRTTVIDPQGAAETNDFGPGDVWYFPRGHGHMLECLGDKPAHFILIFDNGYFSEFGTFSITDWIGHTPKALLAKNFGLPESAFDGFPKDEVYFARGAVPPATPAAPLQGRKLPPLTHKYELLEQAPHKVFKGGREWRVDSTRFPISKTVTGVVLDLEPGALRELHWHPNADEWQYVIDGNISVTMFGSHGRYRTEQMEKGDVGYIPQGYGHSIENVGDRPCRVLIGFNTGNYQAIDLSQWIAGNPADVLATNFSKPTSLFEKFPKQDVFIAPGKGQTGHHHHHH

SEQ ID NO: 385 - DNA, 1107 bp, synthetic construct
  misc_feature 1..1107: note = Variant of oxalate decarboxylase from Gemmata sp. SH-PL17
  source 1..1107: mol_type = other DNA
atgggtgatccgacctttatgaataatgtgccagaccatctgctggcggataaagatttgccgacgttcaagtttgccctggaaaagagcaagggcaaagtcattgggaaaagttcgggaaaagaagcaaccgttgttcagttacctatctccaaaggcattgctggtgtgagcatgactcttgaaccgggtgcgatgcgcgaattgcactggcatgccacagcagcagagtgggctttcgtattaaccggccacgtccgtacgacggtgatcgatccacaaggtgcggccgaaaccaacgactttggaccgggcgacgtgtggtattttcctcgcggtcatgggcacatgctggaatgcctgggcgataaaccggcgcatttcattctgatcttcgataacggctacttctcagagtttggcaccttctctattactgactggatcggtcacacaccgaaagcgcttctcgccaagaactttggtctgcccgaatcggcttttgacgggtttcccgttgacgaggtctattttgcacgtggcgcgatcccaccagccacccctgcagcgcctttacagggacgcaaattgccaccactcacgcataaatacgaactcctcgaacaagctcctcataaagttttcaaaggtggtcgtgaatggcgcgtggatagcacccgttttcccatttccaagactgtaaccggcgttgttcttgatttggaacccggcgcgttacgcgagcttcactggcatcctaatgctgacgagtggcaatatgtgatcgatggcaacattagtgtgacgatgttcggttctcatggccgttaccgcaccgaacagatggagaaaggtgatgtcgggtatattccacaggggtatggccacagcatcgaaaatgtgggagatcgtccttgtcgcgtcttgattggctttaacacaggtaactaccaagcgatcgacttatcacagtggattgcaggtaatcccgcggatgttcttgccacgaacttcagcaaacccacccgcctctttgaacgtttcccaaaacaggacgtgtttattgctcctggcaagggccaaactggccaccatcaccatcaccat

SEQ ID NO: 386 - protein, 369 aa, synthetic construct
  REGION 1..369: note = Variant of oxalate decarboxylase from Gemmata sp. SH-PL17
MGDPTFMNNVPDHLLADKDLPTFKFALEKSKGKVIGKSSGKEATVVQLPISKGIAGVSMTLEPGAMRELHWHATAAEWAFVLTGHVRTTVIDPQGAAETNDFGPGDVWYFPRGHGHMLECLGDKPAHFILIFDNGYFSEFGTFSITDWIGHTPKALLAKNFGLPESAFDGFPVDEVYFARGAIPPATPAAPLQGRKLPPLTHKYELLEQAPHKVFKGGREWRVDSTRFPISKTVTGVVLDLEPGALRELHWHPNADEWQYVIDGNISVTMFGSHGRYRTEQMEKGDVGYIPQGYGHSIENVGDRPCRVLIGFNTGNYQAIDLSQWIAGNPADVLATNFSKPTRLFERFPKQDVFIAPGKGQTGHHHHHH

SEQ ID NO: 387 - DNA, 1107 bp, synthetic construct
  misc_feature 1..1107: note = Variant of oxalate decarboxylase from Gemmata sp. SH-PL17
  source 1..1107: mol_type = other DNA
atgggtgatccgacctttatgaataatgtgccagaccatctgctgagggataaagatttgccgacgttcaagtttgccctggaaaagagcaagggcaaagtcattgggaaaagttcgggaaaagaagcaaccgttgttcagttacctatctccaaaggcattgctggtgtgagcatgactcttgaaccgggtgcgatgcgcgaattgcactggcatgccacagcagcagagtgggctttcgtattaaccggccacgtccgtacgacggtgatcgatccacaaggtgcggccgaaaccaacgactttggaccgggcgacgtgtggtattttcctcgcggtcatgggcacatgctggaatgcctgggcgataaaccggcgcatttcattctgatcttcgataacggctacttctcagagtttggcaccttctctattactgactggatcggtcacacaccgaaagcgcttctcgccaagaactttggtctgcccgaatcggcttttgatgggtttcccaaagacgaggtctattttgcacgtggcgcggttccaccagccacccctgcagcgcctttacagggacgcaaattgccaccactcacgcataaatacgaactcctcgaacaagctcctcataaagttttcaaaggtggtcgtgaatggcgcgtggatagcacccgttttcccatttccaagactgtaaccggcgttgttcttgatttggaacccggcgcgttacgcgagcttcactggcatcctaatgctgacgagtggcaatatgtgatcgatggcaacattagtgtgacgatgttcggttctcatggccgttaccgcaccgaacagatggagaaaggtgatgtcgggtatattccacaggggtatggccacagcatcgaaaatgtgggagatcgtccttgtcgcgtcttgattggctttaacacaggtaactaccaagcgatcgacttatcacagtggattgcaggtaatcccgcggatgttcttgccacgaacttctccaaacccaccagcctctttgaaaagttcccaaaacaggacgtgtttattgctcctggcaagggccaaactggccaccatcaccatcaccat

SEQ ID NO: 388 - protein, 369 aa, synthetic construct
  REGION 1..369: note = Variant of oxalate decarboxylase from Gemmata sp. SH-PL17
MGDPTFMNNVPDHLLRDKDLPTFKFALEKSKGKVIGKSSGKEATVVQLPISKGIAGVSMTLEPGAMRELHWHATAAEWAFVLTGHVRTTVIDPQGAAETNDFGPGDVWYFPRGHGHMLECLGDKPAHFILIFDNGYFSEFGTFSITDWIGHTPKALLAKNFGLPESAFDGFPKDEVYFARGAVPPATPAAPLQGRKLPPLTHKYELLEQAPHKVFKGGREWRVDSTRFPISKTVTGVVLDLEPGALRELHWHPNADEWQYVIDGNISVTMFGSHGRYRTEQMEKGDVGYIPQGYGHSIENVGDRPCRVLIGFNTGNYQAIDLSQWIAGNPADVLATNFSKPTSLFEKFPKQDVFIAPGKGQTGHHHHHH

SEQ ID NO: 389 - DNA, 1107 bp, synthetic construct
  misc_feature 1..1107: note = Variant of oxalate decarboxylase from Gemmata sp. SH-PL17
  source 1..1107: mol_type = other DNA
atgggtgatccgacctttatgaataatgtgccagaccatctgctggcggataaagatttgccgacgttcaagtttgccctggaaaagagcaagggcaaagtcattgggaaaagttcgggaaaagaagcaaccgttgttcagttacctatctccaaaggcattgctggtgtgagcatgactcttgaaccgggtgcgatgcgcgaattgcactggcatgccacagcagcagagtgggctttcgtattaaccggccacgtccgtacgacggtgatcgatccacaaggtgcggccgaaaccaacgactttggacagggcgacgtgtggtattttcctcgcggtcatgggcacatgctggaatgcctgggcgataaaccggcgcatttcattctgatcttcgataacggctacttctcagagtttggcaccttctctattactgactggatcggtcacacaccgaaagcgcttctcgccaagaactttggtctgcccgaatcggcttttgatgggtttcccaaagacgaggtctattttgcacgtggcgcggttccaccagccacccctgcagcgcctttacagggacgcaaattgccaccactcacgcataaatacgaactcctcgaacaagctcctcataaagttttcaaaggtggtcgtgaatggcgcgtggatagcacccgttttcccatttccaagactgtaaccggcgttgttcttgatttggaacccggcgcgttacgcgagcttcactggcatcctaatgctgacgagtggcaatatgtgatcgatggctgtattagtgtgacgatgttcggttctcatggccgttaccgcaccgaacagatggagaaaggtgatgtcgggtatattccacaggggtatggccacagcatcgaaaatgtgggagatcgtccttgtcgcgtcttgattggctttaacacaggtaactaccaagcgatcgacttatcacagtggattgcaggtaatcccgcggatgttcttgccacgaacttctccaaacccaccagcctctttgaaaagttcccaaaacaggacgtgtttattgctcctggcaagggccaaactggccaccatcaccatcaccat

SEQ ID NO: 390 - protein, 369 aa, synthetic construct
  REGION 1..369: note = Variant of oxalate decarboxylase from Gemmata sp. SH-PL17
MGDPTFMNNVPDHLLADKDLPTFKFALEKSKGKVIGKSSGKEATVVQLPISKGIAGVSMTLEPGAMRELHWHATAAEWAFVLTGHVRTTVIDPQGAAETNDFGQGDVWYFPRGHGHMLECLGDKPAHFILIFDNGYFSEFGTFSITDWIGHTPKALLAKNFGLPESAFDGFPKDEVYFARGAVPPATPAAPLQGRKLPPLTHKYELLEQAPHKVFKGGREWRVDSTRFPISKTVTGVVLDLEPGALRELHWHPNADEWQYVIDGCISVTMFGSHGRYRTEQMEKGDVGYIPQGYGHSIENVGDRPCRVLIGFNTGNYQAIDLSQWIAGNPADVLATNFSKPTSLFEKFPKQDVFIAPGKGQTGHHHHHH

SEQ ID NO: 391 - DNA, 1107 bp, synthetic construct
  misc_feature 1..1107: note = Variant of oxalate decarboxylase from Gemmata sp. SH-PL17
  source 1..1107: mol_type = other DNA
atgggtgatccgacctttatgaataatgtgccagaccatctgctggcggataaagatttgccgacgttcaagtttgccctggaaaagagcaagggcaaagtcattgggaaaagttcgggaaaagaagcaaccgttgttcagttacctatctccaaaggcattgctggtgtgagcatgactcttgaaccgggtgcgatgcgcgaattgcactggcatgccacagcagcagagtgggctttcgtattaaccggccacgtccgtacgacggtgatcgatccacaaggtgcggccgaaaccaacgactttggaccgggcgacgtgtggtattttcctcgcggtcatgggcacatgctggaatgcctgggcgataaaccggcgcatttcattctgatcttcgataacggctacttctcagagtttggcaccttctctattactgactggatcggtcacacaccgaaagcgcttctcgccaagaactttggtctgcccgaatcggcttttgatgggtttcccaaagacgaggtctattttgcacgtggcgcggttccaccagccacccctgcagcgcctttacagggacgcaaattgccaccactcacgcataaatacgaactcctcgaacaagctcctcataaagttttcaaaggtggtcgtgaatggcgcgtggatagcacccgttttcccatttccaagagggtaaccggcgttgttcttgatttggaacccggcgcgttacgcgagcttcactggcatcctaatgctgacgagtggcaatatgtgatcgatggcaacattagtgtgacgatgttcggttctcatggccgttaccgcaccgaacagatggagaaaggtgatgtcgggtatattccacaggggtatggccacagcatcgaaaatgtgggagatcgtccttgtcgcgtcttgattggctttaacacaggtaactaccaagcgatcgacttatcacagtggattgcaggtaatcccgcggatgttcttgccacgaacttctccaaacccaccagcctctttgaaaagttcccaaaacaggacgtgtttattgctcctggcaagggccaaactggccaccatcaccatcaccat

SEQ ID NO: 392 - protein, 369 aa, synthetic construct
  REGION 1..369: note = Variant of oxalate decarboxylase from Gemmata sp. SH-PL17
MGDPTFMNNVPDHLLADKDLPTFKFALEKSKGKVIGKSSGKEATVVQLPISKGIAGVSMTLEPGAMRELHWHATAAEWAFVLTGHVRTTVIDPQGAAETNDFGPGDVWYFPRGHGHMLECLGDKPAHFILIFDNGYFSEFGTFSITDWIGHTPKALLAKNFGLPESAFDGFPKDEVYFARGAVPPATPAAPLQGRKLPPLTHKYELLEQAPHKVFKGGREWRVDSTRFPISKRVTGVVLDLEPGALRELHWHPNADEWQYVIDGNISVTMFGSHGRYRTEQMEKGDVGYIPQGYGHSIENVGDRPCRVLIGFNTGNYQAIDLSQWIAGNPADVLATNFSKPTSLFEKFPKQDVFIAPGKGQTGHHHHHH

SEQ ID NO: 393 - DNA, 1107 bp, synthetic construct
  misc_feature 1..1107: note = Variant of oxalate decarboxylase from Gemmata sp. SH-PL17
  source 1..1107: mol_type = other DNA
atgggtgatccgacctttatgaataatgtgccagaccatctgctggcggataaagatttgccgacgttcaagtttgccctggaaaagagcaagggcaaagtcattgggaaaagttcgggaaaagaagcaaccgttgttcagttacctatctccaaaggcattgctggtgtgagcatgactcttgaaccgggtgcgatgcgcgaattgcactggcatgccacagcagcagagtgggctttcgtattaaccggccacgtccgtacgacggtgatcgatccacaaggtgcggccgaaaccaacgactttggaccgggcgacgtgtggtattttcctcgcggtcatgggcacatgctggaatgcctgggcgataaaccggcgcatttcattctgatcttcgataacggctacttctcagagtttggcaccttctctattactgactggatcggtcacacaccgaaagcgcttctcgccaagaactttggtctgcccgaatcggcttttgatgggtttcccaaagacgaggtctattttgcacgtggcgcggttccaccagccacccctgcagcgcctttacagggacgcaaattgccaccactcacgcataaatacgaactcctcgaacaagctcctcataaagttttcaaaggtggtcgtgaatggcgcgtggatagcacccgttttcccatttccaaggatgtaaccggcgttgttcttgatttggaacccggcgcgttacgcgagcttcactggcatcctaatgctgacgagtggcaatatgtgatcgatggcaacattagtgtgacgatgttcggttctcatggccgttaccgcaccgaacagatggagaaaggtgatgtcgggtatattccacaggggtatggccacagcatcgaaaatgtgggagatcgtccttgtcgcgtcttgattggctttaacacaggtaactaccaagcgatcgacttatcacagtggattgcaggtaatcccgcggatgttcttgccacgaacttctccaaacccaccagcctctttgaaaagttcccaaaacaggacgtgtttattgctcctggcaagggccaaactggccaccatcaccatcaccat

SEQ ID NO: 394 - protein, 369 aa, synthetic construct
  REGION 1..369: note = Variant of oxalate decarboxylase from Gemmata sp. SH-PL17
MGDPTFMNNVPDHLLADKDLPTFKFALEKSKGKVIGKSSGKEATVVQLPISKGIAGVSMTLEPGAMRELHWHATAAEWAFVLTGHVRTTVIDPQGAAETNDFGPGDVWYFPRGHGHMLECLGDKPAHFILIFDNGYFSEFGTFSITDWIGHTPKALLAKNFGLPESAFDGFPKDEVYFARGAVPPATPAAPLQGRKLPPLTHKYELLEQAPHKVFKGGREWRVDSTRFPISKDVTGVVLDLEPGALRELHWHPNADEWQYVIDGNISVTMFGSHGRYRTEQMEKGDVGYIPQGYGHSIENVGDRPCRVLIGFNTGNYQAIDLSQWIAGNPADVLATNFSKPTSLFEKFPKQDVFIAPGKGQTGHHHHHH

SEQ ID NO: 395 - DNA, 1107 bp, synthetic construct
  misc_feature 1..1107: note = Variant of oxalate decarboxylase from Gemmata sp. SH-PL17
  source 1..1107: mol_type = other DNA
atgggtgatccgacctttatgaataatgtgccagaccctctgctgtcgcataaagatttgccgacgttcaagtttgaactggaaaagagcaagggcaaagtcattgggaaaagttcgggaaaagaagcaaccgttgttcagttacctatctccaaaggcattgctggtgtgagcatgactcttgaaccgggtgcgatgcgcgaattgcactggcatgccacagcagcagagtgggctttcgtattaaccggccacgtccgtacgacggtgatcgatccacaaggtgcggccgaaaccaacgactttggaccgggcgacgtgtggtattttcctcgcggtcatgggcacatgctggaatgcctgggcgataaaccggcgcatttcattctgatcttcgataacggctacttctcagagtttggcaccttctctattactgactggatcggtcacacaccgaaagcgcttctcgccaagaactttggtctgcccgaatcggcttttgatgggtttcccaaaaaagaggtctattttgcacgtggcgcggttccaccagccacccctgcagcgcctttacagggactgaagttgccaccactcacgcataaatacgaactcctcgaacaagaacctcataaagttttcaaaggtggtcgtgaatggcgcgtggatagctcgcgttttcccatttccaagactgtaaccggcgttgttcttgatttggaacccggcgcgttacgcgagcttcactggcatcctaatgctgacgagtggcaatatgtgatcgatggcaacattagtgtgacgatgttcggttctcatggccgttaccgcaccgaacagatggagaagggtgatgtcgggtatattccacaggggtatggccacagcatcgaaaatgtgggagatcgtccttgtcgcgtcttgattggctttaacacaggtaactaccaagcgatcgacttatcacagtggattgcaggtaatcccgcggatgttcttgccacgaacttctccaaacccaccagcctctttgaaaagttcccaaaacaggacgtgtttattgctcctggcaagggccaaactggccaccatcaccatcaccat

SEQ ID NO: 396 - protein, 369 aa, synthetic construct
  REGION 1..369: note = Variant of oxalate decarboxylase from Gemmata sp. SH-PL17
MGDPTFMNNVPDPLLSHKDLPTFKFELEKSKGKVIGKSSGKEATVVQLPISKGIAGVSMTLEPGAMRELHWHATAAEWAFVLTGHVRTTVIDPQGAAETNDFGPGDVWYFPRGHGHMLECLGDKPAHFILIFDNGYFSEFGTFSITDWIGHTPKALLAKNFGLPESAFDGFPKKEVYFARGAVPPATPAAPLQGLKLPPLTHKYELLEQEPHKVFKGGREWRVDSSRFPISKTVTGVVLDLEPGALRELHWHPNADEWQYVIDGNISVTMFGSHGRYRTEQMEKGDVGYIPQGYGHSIENVGDRPCRVLIGFNTGNYQAIDLSQWIAGNPADVLATNFSKPTSLFEKFPKQDVFIAPGKGQTGHHHHHH

SEQ ID NO: 397 - DNA, 1107 bp, synthetic construct
  misc_feature 1..1107: note = Variant of oxalate decarboxylase from Gemmata sp. SH-PL17
  source 1..1107: mol_type = other DNA
atgggtgatccgacctttatgaataatgtgccagaccatctgctgtcgcataaagatttgccgacgttcaagtttgaactggaaaagagcaagggcaaagtcattgggaaaagttcgggaaaagaagcaaccgttgttcagttacctatctccaaaggcattgctggtgtgagcatgactcttgaaccgggtgcgatgcgcgaattgcactggcatgccacagcagcagagtgggctttcgtattaaccggccacgtccgtacgacggtgatcgatccacaaggtgcggccgaaaccaacgactttggaccgggcgacgtgtggtattttcctcgcggtcatgggcacatgctggaatgcctgggcgataaaccggcgcatttcattctgatcttcgataacggctacttctcagagtttggcaccttctctattactgactggatcggtcacacaccgaaagcgcttctcgccaagaactttggtctgcccgaatcggcttttgatgggtttcccaaaaaagaggtctattttgcacgtggcgcggttccaccagccacccctgcagcgcctttacagggactggtattgccaccactcacgcataaatacgaactcctcgaacaagaaccttcgaaagttttcaaaggtggtcgtgaatggcgcgtggatagctcgcgttttcccatttccaagactgtaaccggcgttgttcttgatttggaacccggcgcgttacgcgagcttcactggcatcctaatgctgacgagtggcaatatgtgatcgatggcaacattagtgtgacgatgttcggttctcatggccgttaccgcaccgaacagatggagaagggtgatgtcgggtatattccacaggggtatggccacagcatcgaaaatgtgggagatcgtccttgtcgcgtcttgattggctttaacacaggtaactaccaagcgatcgacttatcacagtggattgcaggtaatcccgtggatgttcttgccacgaacttctccaaacccaccagcctctttgaaaagttcccaaaacaggacgtgtttattgctcctggcaagggccaaactggccaccatcaccatcaccat

SEQ ID NO: 398 - protein, 369 aa, synthetic construct
  REGION 1..369: note = Variant of oxalate decarboxylase from Gemmata sp. SH-PL17
MGDPTFMNNVPDHLLSHKDLPTFKFELEKSKGKVIGKSSGKEATVVQLPISKGIAGVSMTLEPGAMRELHWHATAAEWAFVLTGHVRTTVIDPQGAAETNDFGPGDVWYFPRGHGHMLECLGDKPAHFILIFDNGYFSEFGTFSITDWIGHTPKALLAKNFGLPESAFDGFPKKEVYFARGAVPPATPAAPLQGLVLPPLTHKYELLEQEPSKVFKGGREWRVDSSRFPISKTVTGVVLDLEPGALRELHWHPNADEWQYVIDGNISVTMFGSHGRYRTEQMEKGDVGYIPQGYGHSIENVGDRPCRVLIGFNTGNYQAIDLSQWIAGNPVDVLATNFSKPTSLFEKFPKQDVFIAPGKGQTGHHHHHH

SEQ ID NO: 399 - DNA, 1107 bp, synthetic construct
  misc_feature 1..1107: note = Variant of oxalate decarboxylase from Gemmata sp. SH-PL17
  source 1..1107: mol_type = other DNA
atgggtgatccgacctttatgaataatgtgccagaccatctgctgtcgcataaagatttgccgacgttcaagtttgcgctggaaaagagcaagggcaaagtcattgggaaaagttcgggaaaagaagcaaccgttgtccagttacctatctccaaaggcattgctggtgtgagcatgactcttgaaccgggtgcgatgcgcgaattgcactggcatgccacagcagcagagtgggctttcgtattaaccggccacgtccgtacgacggtgatcgatccacaaggtgcggccgaaaccaacgactttggaccgggcgacgtgtggtattttcctcgcggtcatgggcacatgctggaatgcctgggcgataaaccggcgcatttcattctgatcttcgataacggctacttctcagagtttggcaccttctctattactgactggatcggtcacacaccgaaagcgcttctcgccaagaactttggtctgcccgaatcggcttttgatgggtttcccaaaaaagaggtctattttgcacgtggcgcggttccaccagccacccctgcagcgcctttacagggactgaagttgccaccactcacgcataaatacgaactcctcgaacaagaaccttcgaaagttttcaaaggtggtcgtgaatggcgcgtggatagcactcgttttcccatttccaagactgtaaccggcgttgttcttgatttggaacccggcgcgttacgcgagcttcactggcatcctaatgctgacgagtggcaatatgtgatcgatggcaacattagtgtgacgatgttcggttctcatggccgttaccgcaccgaacagatggagaagggtgatgtcgggtatattccacaggggtatggccacagcatcgaaaatgtgggagatcgtccttgtcgcgtcttgattggctttaacacaggtaactaccaagcgatcgacttatcacagtggattgcaggtaatcccgcggatgttcttgccacgaacttctccaaacccaccagcctctttgaaaagttcccaaaacaggacgtgtttattgctcctggcaagggccaaactggccaccatcaccatcaccat

SEQ ID NO: 400 - protein, 369 aa, synthetic construct
  REGION 1..369: note = Variant of oxalate decarboxylase from Gemmata sp. SH-PL17
MGDPTFMNNVPDHLLSHKDLPTFKFALEKSKGKVIGKSSGKEATVVQLPISKGIAGVSMTLEPGAMRELHWHATAAEWAFVLTGHVRTTVIDPQGAAETNDFGPGDVWYFPRGHGHMLECLGDKPAHFILIFDNGYFSEFGTFSITDWIGHTPKALLAKNFGLPESAFDGFPKKEVYFARGAVPPATPAAPLQGLKLPPLTHKYELLEQEPSKVFKGGREWRVDSTRFPISKTVTGVVLDLEPGALRELHWHPNADEWQYVIDGNISVTMFGSHGRYRTEQMEKGDVGYIPQGYGHSIENVGDRPCRVLIGFNTGNYQAIDLSQWIAGNPADVLATNFSKPTSLFEKFPKQDVFIAPGKGQTGHHHHHH

SEQ ID NO: 401 - DNA, 1107 bp, synthetic construct
  misc_feature 1..1107: note = Variant of oxalate decarboxylase from Gemmata sp. SH-PL17
  source 1..1107: mol_type = other DNA
atgggtgatccgacctttatgaataatgtgccagaccatctgctgtcgcataaagatttgccgacgttcaagtttgcgctggaaaagagcaagggcaaagtcattgggaaaagttcgggaaaagaagcaaccgttgtccagttacctatctccaaaggcattgctggtgtgagcatgactcttgaaccgggtgcgatgcgcgaattgcactggcatgccacagcagcagagtgggctttcgtattaaccggccacgtccgtacgacggtgatcgatccacaaggtgcggccgaaaccaacgactttggaccgggcgacgtgtggtattttcctcgcggtcatgggcacatgctggaatgcctgggcgataaaccggcgcatttcattctgatcttcgataacggctacttctcagagtttggcaccttctctattactgactggatcggtcacacaccgaaagcgcttctcgccaagaactttggtctgcccgaatcggcttttgatgggtttcccaaaaaagaggtctattttgcacgtggcgcggttccaccagccacccctgcagcgcctttacagggactgaagttgccaccactcacgcataaatacgaactcctcgaacaagaacctgcgaaagttttcaaaggtggtcgtgaatggcgcgtggatagcactcgttttcccatttccaagactgtaaccggcgttgttcttgatttggaacccggcgcgttacgcgagcttcactggcatcctaatgctgacgagtggcaatatgtgatcgatggcaacattagtgtgacgatgttcggttctcatggccgttaccgcaccgaacagatggagaagggtgatgtcgggtatattccacaggggtatggccacagcatcgaaaatgtgggagatcgtccttgtcgcgtcttgattggctttaacacaggtaactaccaagcgatcgacttatcacagtggattgcaggtaatcccgtggatgttcttgccacgaacttctccaaacccaccagcctctttgaaaagttcccaaaacaggacgtgtttattgctcctggcaagggccaaactggccaccatcaccatcaccat

SEQ ID NO: 402 - protein, 369 aa, synthetic construct
  REGION 1..369: note = Variant of oxalate decarboxylase from Gemmata sp. SH-PL17
MGDPTFMNNVPDHLLSHKDLPTFKFALEKSKGKVIGKSSGKEATVVQLPISKGIAGVSMTLEPGAMRELHWHATAAEWAFVLTGHVRTTVIDPQGAAETNDFGPGDVWYFPRGHGHMLECLGDKPAHFILIFDNGYFSEFGTFSITDWIGHTPKALLAKNFGLPESAFDGFPKKEVYFARGAVPPATPAAPLQGLKLPPLTHKYELLEQEPAKVFKGGREWRVDSTRFPISKTVTGVVLDLEPGALRELHWHPNADEWQYVIDGNISVTMFGSHGRYRTEQMEKGDVGYIPQGYGHSIENVGDRPCRVLIGFNTGNYQAIDLSQWIAGNPVDVLATNFSKPTSLFEKFPKQDVFIAPGKGQTGHHHHHH

SEQ ID NO: 403 - DNA, 1107 bp, synthetic construct
  misc_feature 1..1107: note = Variant of oxalate decarboxylase from Gemmata sp. SH-PL17
  source 1..1107: mol_type = other DNA
atgggtgatccgacctttatgaataatgtgccagaccctctgctgtcgcataaagatttgccgacgttcaagtttgcgctggaaaagagcaagggcaaagtcattgggaaaagttcgggaaaagaagcaaccgttgtccagttacctatctccaaaggcattgctggtgtgagcatgactcttgaaccgggtgcgatgcgcgaattgcactggcatgccacagcagcagagtgggctttcgtattaaccggccacgtccgtacgacggtgatcgatccacaaggtgcggccgaaaccaacgactttggaccgggcgacgtgtggtattttcctcgcggtcatgggcacatgctggaatgcctgggcgataaaccggcgcatttcattctgatcttcgataacggctacttctcagagtttggcaccttctctattactgactggatcggtcacacaccgaaagcgcttctcgccaagaactttggtctgcccgaatcggcttttgatgggtttcccaaaaaagaggtctattttgcacgtggcgcggttccaccagccacccctgcagcgcctttacagggactgaagttgccaccactcacgcataaatacgaactcctcgaacaagaacctcataaagttttcaaaggtggtcgtgaatggcgcgtggatagctcgcgttttcccatttccaagactgtaaccggcgttgttcttgatttggaacccggcgcgttacgcgagcttcactggcatcctaatgctgacgagtggcaatatgtgatcgatggcaacattagtgtgacgatgttcggttctcatggccgttaccgcaccgaacagatggagaagggtgatgtcgggtatattccacaggggtatggccacagcatcgaaaatgtgggagatcgtccttgtcgcgtcttgattggctttaacacaggtaactaccaagcgatcgacttatcacagtggattgcaggtaatcccgtggatgttcttgccacgaacttctccaaacccaccagcctctttgaaaagttcccaaaacaggacgtgtttattgctcctggcaagggccaaactggccaccatcaccatcaccat

SEQ ID NO: 404 - protein, 369 aa, synthetic construct
  REGION 1..369: note = Variant of oxalate decarboxylase from Gemmata sp. SH-PL17
MGDPTFMNNVPDPLLSHKDLPTFKFALEKSKGKVIGKSSGKEATVVQLPISKGIAGVSMTLEPGAMRELHWHATAAEWAFVLTGHVRTTVIDPQGAAETNDFGPGDVWYFPRGHGHMLECLGDKPAHFILIFDNGYFSEFGTFSITDWIGHTPKALLAKNFGLPESAFDGFPKKEVYFARGAVPPATPAAPLQGLKLPPLTHKYELLEQEPHKVFKGGREWRVDSSRFPISKTVTGVVLDLEPGALRELHWHPNADEWQYVIDGNISVTMFGSHGRYRTEQMEKGDVGYIPQGYGHSIENVGDRPCRVLIGFNTGNYQAIDLSQWIAGNPVDVLATNFSKPTSLFEKFPKQDVFIAPGKGQTGHHHHHH

SEQ ID NO: 405 - DNA, 1107 bp, synthetic construct
  misc_feature 1..1107: note = Variant of oxalate decarboxylase from Gemmata sp. SH-PL17
  source 1..1107: mol_type = other DNA
atgggtgatccgacctttatgaataatgtgccagaccatctgctgtcgcataaagatttgccgacgttcaagtttgaactggaaaagagcaagggcaaagtcattgggaaaagttcgggaaaagaagcaaccgttgtccagttacctatctccaaaggcattgctggtgtgagcatgcgtcttgaaccgggtgcgatgcgcgaattgcactggcatgccacagcagcagagtgggctttcgtattaaccggccacgtccgtacgacggtgatcgatccacaaggtgcggccgaaaccaacgactttggaccgggcgacgtgtggtattttcctcgcggtcatgggcacatgctggaatgcctgggcgataaaccggcgcatttcattctgatcttcgataacggctacttctcagagtttggcaccttctctattactgactggatcggtcacacaccgaaagcgcttctcgccaagaactttggtctgcccgaatcggcttttgatgggtttcccaaaaaagaggtctattttgcacgtggcgcggttccaccagccacccctgcagcgcctttacagggactgaagttgccaccactcacgcataaatacgaactcctcgaacaagaacctcataaagttttcaaaggtggtcgtgaatggcgcgtggatagcactcgttttcccatttccaagactgtaaccggcgttgttcttgatttggaacccggcgcgttacgcgagcttcactggcatcctaatgctgacgagtggcaatatgtgatcgatggcaacattagtgtgacgatgttcggttctcatggccgttaccgcaccgaacagatggagaagggtgatgtcgggtatattccacaggggtatggccacagcatcgaaaatgtgggagatcgtccttgtcgcgtcttgattggctttaacacaggtaactaccaagcgatcgacttatcacagtggattgcaggtaatcccgcggatgttcttgccacgaacttctccaaacccaccagcctctttgaaaagttcccaaaacaggacgtgtttattgctcctggcaagggccaaactggccaccatcaccatcaccat

SEQ ID NO: 406 - protein, 369 aa, synthetic construct
  REGION 1..369: note = Variant of oxalate decarboxylase from Gemmata sp. SH-PL17
MGDPTFMNNVPDHLLSHKDLPTFKFELEKSKGKVIGKSSGKEATVVQLPISKGIAGVSMRLEPGAMRELHWHATAAEWAFVLTGHVRTTVIDPQGAAETNDFGPGDVWYFPRGHGHMLECLGDKPAHFILIFDNGYFSEFGTFSITDWIGHTPKALLAKNFGLPESAFDGFPKKEVYFARGAVPPATPAAPLQGLKLPPLTHKYELLEQEPHKVFKGGREWRVDSTRFPISKTVTGVVLDLEPGALRELHWHPNADEWQYVIDGNISVTMFGSHGRYRTEQMEKGDVGYIPQGYGHSIENVGDRPCRVLIGFNTGNYQAIDLSQWIAGNPADVLATNFSKPTSLFEKFPKQDVFIAPGKGQTGHHHHHH

SEQ ID NO: 407 - DNA, 1107 bp, synthetic construct
  misc_feature 1..1107: note = Variant of oxalate decarboxylase from Gemmata sp. SH-PL17
  source 1..1107: mol_type = other DNA
atgggtgatccgacctttatgaataatgtgccagaccatctgctgtcgcataaagatttgccgacgttcaagtttgagctggaaaagagcaagggcaaagtcattgggaaaagttcgggaaaagaagcaaccgttcgtcagttacctatctccaaaggcattgctggtgtgagcatgactcttgaaccgggtgcgatgcgcgaattgcactggcatgccacagcagcagagtgggctttcgtattaaccggccacgtccgtacgacggtgatcgatccacaaggtgcggccgaaaccaacgactttggaccgggcgacgtgtggtattttcctcgcggtcatgggcacatgctggaatgcctgggcgataaaccggcgcatttcattctgatcttcgataacggctacttctcagagtttggcaccttctctattactgactggatcggtcacacaccgaaagcgcttctcgccaagaactttggtctgcccgaatcggcttttgatgggtttcccaaaaaagaggtctattttgcacgtggcgcggttccaccagccacccctgcagcgcctttacagggactggtattgccaccactcacgcataaatacgaactcctcgaacaagaaccttcgaaagttttcaaaggtggtcgtgaatggcgcgtggatagcagtcgttttcccatttccaagactgtaaccggcgttgttcttgatttggaacccggcgcgttacgcgagcttcactggcatcctaatgctgacgagtggcaatatgtgatcgatggcaacattagtgtgacgatgttcggttctcatggccgttaccgcaccgaacagatggagaagggtgatgtcgggtatattccacaggggtatggccacagcatcgaaaatgtgggagatcgtccttgtcgcgtcttgattggctttaacacaggtaactaccaagcgatcgacttatcacagtggattgcaggtaatcccgcggatgttcttgccacgaacttctccaaacccaccagcctctttgaaaagttcccaaaacaggacgtgtttattgctcctggcaagggccaaactggccaccatcaccatcaccat

SEQ ID NO: 408 - protein, 369 aa, synthetic construct
  REGION 1..369: note = Variant of oxalate decarboxylase from Gemmata sp. SH-PL17
MGDPTFMNNVPDHLLSHKDLPTFKFELEKSKGKVIGKSSGKEATVRQLPISKGIAGVSMTLEPGAMRELHWHATAAEWAFVLTGHVRTTVIDPQGAAETNDFGPGDVWYFPRGHGHMLECLGDKPAHFILIFDNGYFSEFGTFSITDWIGHTPKALLAKNFGLPESAFDGFPKKEVYFARGAVPPATPAAPLQGLVLPPLTHKYELLEQEPSKVFKGGREWRVDSSRFPISKTVTGVVLDLEPGALRELHWHPNADEWQYVIDGNISVTMFGSHGRYRTEQMEKGDVGYIPQGYGHSIENVGDRPCRVLIGFNTGNYQAIDLSQWIAGNPADVLATNFSKPTSLFEKFPKQDVFIAPGKGQTGHHHHHH

SEQ ID NO: 409 - DNA, 1107 bp, synthetic construct
  misc_feature 1..1107: note = Variant of oxalate decarboxylase from Gemmata sp. SH-PL17
  source 1..1107: mol_type = other DNA
atgggtgatccgacctttatgaataatgtgccagaccatctgctgtcggacaaagatttgccgacgttcaagtttgcgctggaaaagagcaagggcaaagtcattgggaaaagttcgggaaaagaagcaaccgttgttcagttacctatctccaaaggcattgctggtgtgagcatggtgcttgaaccgggtgcgatgcgcgaattgcactggcatgccacagcagcagagtgggctttcgtattaaccggccacgtccgtacgacggtgatcgatccacaaggtgcggccgaaaccaacgactttggaccgggcgacgtgtggtattttcctcgcggtcatgggcacatgctggaatgcctgggcgataaaccggcgcatttcattctgatcttcgataacggctacttctcagagtttggcaccttctctattactgactggatcggtcacacaccgaaagcgcttctcgccaagaactttggtctgcccgaatcggcttttgatgggtttcccaaaaaagaggtctattttgcacgtggcgcggttccaccagccacccctgcagcgcctttacagggactgaagttgccaccactcacgcataaatacgaactcctcgaacaagaacctcataaagttttcaaaggtggtcgtgaatggcgcgtggatagcactcgttttcccatttccaagactgtaaccggcgttgttcttgatttggaacccggcgcgttacgcgagcttcactggcatcctaatgctgacgagtggcaatatgtgatcgatggcaacattagtgtgacgatgttcggttctcatggccgttaccgcaccgaacagatggagaagggtgatgtcgggtatattccacaggggtatggccacagcatcgaaaatgtgggagatcgtccttgtcgcgtcttgattggctttaacacaggtaactaccaagcgatcgacttatcacagtggattgcaggtaatcccgtggatgttcttgccacgaacttctccaaacccaccagcctctttgaaaagttcccaaaacaggacgtgtttattgctcctggcaagggccaaactggccaccatcaccatcaccat

SEQ ID NO: 410 - protein, 369 aa, synthetic construct
  REGION 1..369: note = Variant of oxalate decarboxylase from Gemmata sp. SH-PL17
MGDPTFMNNVPDHLLSDKDLPTFKFALEKSKGKVIGKSSGKEATVVQLPISKGIAGVSMVLEPGAMRELHWHATAAEWAFVLTGHVRTTVIDPQGAAETNDFGPGDVWYFPRGHGHMLECLGDKPAHFILIFDNGYFSEFGTFSITDWIGHTPKALLAKNFGLPESAFDGFPKKEVYFARGAVPPATPAAPLQGLKLPPLTHKYELLEQEPHKVFKGGREWRVDSTRFPISKTVTGVVLDLEPGALRELHWHPNADEWQYVIDGNISVTMFGSHGRYRTEQMEKGDVGYIPQGYGHSIENVGDRPCRVLIGFNTGNYQAIDLSQWIAGNPVDVLATNFSKPTSLFEKFPKQDVFIAPGKGQTGHHHHHH

SEQ ID NO: 411 - DNA, 1107 bp, synthetic construct
  misc_feature 1..1107: note = Variant of oxalate decarboxylase from Gemmata sp. SH-PL17
  source 1..1107: mol_type = other DNA
atgggtgatccgacctttatgaataatgtgccagaccatctgctgtcgcataaagatttgccgacgttcaagtttgaactggaaaagagcaagggcaaagtcattgggaaaagttcgggaaaagaagcaaccgttcgtcagttacctatctccaaaggcattgctggtgtgagcatgactcttgaaccgggtgcgatgcgcgaattgcactggcatgccacagcagcagagtgggctttcgtattaaccggccacgtccgtacgacggtgatcgatccacaaggtgcggccgaaaccaacgactttggaccgggcgacgtgtggtattttcctcgcggtcatgggcacatgctggaatgcctgggcgataaaccggcgcatttcattctgatcttcgataacggctacttctcagagtttggcaccttctctattactgactggatcggtcacacaccgaaagcgcttctcgccaagaactttggtctgcccgaatcggcttttgatgggtttcccaaaaaagaggtctattttgcacgtggcgcggttccaccagccacccctgcagcgcctttacagggactgaagttgccaccactcacgcataaatacgaactcctcgaacaagaacctgcgaaagttttcaaaggtggtcgtgaatggcgcgtggatagcagtcgttttcccatttccaagactgtaaccggcgttgttcttgatttggaacccggcgcgttacgcgagcttcactggcatcctaatgctgacgagtggcaatatgtgatcgatggcaacattagtgtgacgatgttcggttctcaaggccgttaccgcaccgaacagatggagaagggtgatgtcgggtatattccacaggggtatggccacagcatcgaaaatgtgggagatcgtccttgtcgcgtcttgattggctttaacacaggtaactaccaagcgatcgacttatcacagtggattgcaggtaatcccgtggatgttcttgccacgaacttctccaaacccaccagcctctttgaaaagttcccaaaacaggacgtgtttattgctcctggcaagggccaaactggccaccatcaccatcaccat

SEQ ID NO: 412 - protein, 369 aa, synthetic construct
  REGION 1..369: note = Variant of oxalate decarboxylase from Gemmata sp. SH-PL17
MGDPTFMNNVPDHLLSHKDLPTFKFELEKSKGKVIGKSSGKEATVRQLPISKGIAGVSMTLEPGAMRELHWHATAAEWAFVLTGHVRTTVIDPQGAAETNDFGPGDVWYFPRGHGHMLECLGDKPAHFILIFDNGYFSEFGTFSITDWIGHTPKALLAKNFGLPESAFDGFPKKEVYFARGAVPPATPAAPLQGLKLPPLTHKYELLEQEPAKVFKGGREWRVDSSRFPISKTVTGVVLDLEPGALRELHWHPNADEWQYVIDGNISVTMFGSQGRYRTEQMEKGDVGYIPQGYGHSIENVGDRPCRVLIGFNTGNYQAIDLSQWIAGNPVDVLATNFSKPTSLFEKFPKQDVFIAPGKGQTGHHHHHH

SEQ ID NO: 413 - DNA, 1107 bp, synthetic construct
  misc_feature 1..1107: note = Variant of oxalate decarboxylase from Gemmata sp. SH-PL17
  source 1..1107: mol_type = other DNA
atgggtgatccgacctttatgaataatgtgccagaccatctgctgtcggacaaagatttgccgacgttcaagtttgagctggaaaagagcaagggcaaagtcattgggaaaagttcgggaaaagaagcaaccgttgtccagttacctatctccaaaggcattgctggtgtgagcatgactcttgaaccgggtgcgatgcgcgaattgcactggcatgccacagcagcagagtgggctttcgtattaaccggccacgtccgtacgacggtgatcgatccacaaggtgcggccgaaaccaacgactttggaccgggcgacgtgtggtattttcctcgcggtcatgggcacatgctggaatgcctgggcgataaaccggcgcatttcattctgatcttcgataacggctacttctcagagtttggcaccttctctattactgactggatcggtcacacaccgaaagcgcttctcgccaagaactttggtctgcccgaatcggcttttgatgggtttcccaaaaaagaggtctattttgcacgtggcgcggttccaccagccacccctgcagcgcctttacagggactggtattgccaccactcacgcataaatacgaactcctcgaacaagaaccttcgaaagttttcaaaggtggtcgtgaatggcgcgtggatagctcgcgttttcccatttccaagactgtaaccggcgttgttcttgatttggaacccggcgcgttacgcgagcttcactggcatcctaatgctgacgagtggcaatatgtgatcgatggcaacattagtgtgacgatgttcggttctcatggccgttaccgcaccgaacagatggagaagggtgatgtcgggtatattccacaggggtatggccacagcatcgaaaatgtgggagatcgtccttgtcgcgtcttgattggctttaacacaggtaactaccaagcgatcgacttatcacagtggattgcaggtaatcccgcggatgttcttgccacgaacttctccaaacccaccagcctctttgaaaagttcccaaaacaggacgtgtttattgctcctggcaagggccaaactggccaccatcaccatcaccat

SEQ ID NO: 414 - protein, 369 aa, synthetic construct
  REGION 1..369: note = Variant of oxalate decarboxylase from Gemmata sp. SH-PL17
MGDPTFMNNVPDHLLSDKDLPTFKFELEKSKGKVIGKSSGKEATVVQLPISKGIAGVSMTLEPGAMRELHWHATAAEWAFVLTGHVRTTVIDPQGAAETNDFGPGDVWYFPRGHGHMLECLGDKPAHFILIFDNGYFSEFGTFSITDWIGHTPKALLAKNFGLPESAFDGFPKKEVYFARGAVPPATPAAPLQGLVLPPLTHKYELLEQEPSKVFKGGREWRVDSSRFPISKTVTGVVLDLEPGALRELHWHPNADEWQYVIDGNISVTMFGSHGRYRTEQMEKGDVGYIPQGYGHSIENVGDRPCRVLIGFNTGNYQAIDLSQWIAGNPADVLATNFSKPTSLFEKFPKQDVFIAPGKGQTGHHHHHH

SEQ ID NO: 415 - DNA, 1107 bp, synthetic construct
  misc_feature 1..1107: note = Variant of oxalate decarboxylase from Gemmata sp. SH-PL17
  source 1..1107: mol_type = other DNA
atgggtgatccgacctttatgaataatgtgccagaccatctgctgtcgcataaagatttgccgacgttcaagtttgaactggaaaagagcaagggcaaagtcattgggaaaagttcgggaaaagaagcaaccgttgtccagttacctatctccaaaggcattgctggtgtgagcatgactcttgaaccgggtgcgatgcgcgaattgcactggcatgccacagcagcagagtgggctttcgtattaaccggccacgtccgtacgacggtgatcgatccacaaggtgcggccgaaaccaacgactttggaccgggcgacgtgtggtattttcctcgcggtcatgggcacatgctggaatgcctgggcgataaaccggcgcatttcattctgatcttcgataacggctacttctcagagtttggcaccttctctattactgactggatcggtcacacaccgaaagcgcttctcgccaagaactttggtctgcccgaatcggcttttgatgggtttcccaaaaaagaggtctattttgcacgtggcgcggttccaccagccacccctgcagcgcctttacagggactgaagttgccaccactcacgcataaatacgaactcctcgaacaagaacctcataaagttttcaaaggtggtcgtgaatggcgcgtggatagcactcgttttcccatttccaagactgtaaccggcgttgttcttgatttggaacccggcgcgttacgcgagcttcactggcatcctaatgctgacgagtggcaatatgtgatcgatggcaacattagtgtgacgatgttcggttctcatggccgttaccgcaccgaacagatggagaagggtgatgtcgggtatattccacaggggtatggccacagcatcgaaaatgtgggagatcgtccttgtcgcgtcttgattggctttaacacaggtaactaccaagcgatcgacttatcacagtggattgcaggtaatcccgcggatgttcttgccacgaacttctccaaacccaccagcctctttgaaaagttcccaaaacaggacgtgtttattgctcctggcaagggccaaactggccaccatcaccatcaccat

SEQ ID NO: 416 - protein, 369 aa, synthetic construct
  REGION 1..369: note = Variant of oxalate decarboxylase from Gemmata sp. SH-PL17
MGDPTFMNNVPDHLLSHKDLPTFKFELEKSKGKVIGKSSGKEATVVQLPISKGIAGVSMTLEPGAMRELHWHATAAEWAFVLTGHVRTTVIDPQGAAETNDFGPGDVWYFPRGHGHMLECLGDKPAHFILIFDNGYFSEFGTFSITDWIGHTPKALLAKNFGLPESAFDGFPKKEVYFARGAVPPATPAAPLQGLKLPPLTHKYELLEQEPHKVFKGGREWRVDSTRFPISKTVTGVVLDLEPGALRELHWHPNADEWQYVIDGNISVTMFGSHGRYRTEQMEKGDVGYIPQGYGHSIENVGDRPCRVLIGFNTGNYQAIDLSQWIAGNPADVLATNFSKPTSLFEKFPKQDVFIAPGKGQTGHHHHHH

SEQ ID NO: 417 - DNA, 1107 bp, synthetic construct
  misc_feature 1..1107: note = Variant of oxalate decarboxylase from Gemmata sp. SH-PL17
  source 1..1107: mol_type = other DNA
atgggtgatccgacctttatgaataatgtgccagaccctctgctgtcgcataaagatttgccgacgttcaagtttgcgctggaaaagagcaagggcaaagtcattgggaaaagttcgggaaaagaagcaaccgttgttcagttacctatctccaaaggcattgctggtgtgagcatgactcttgaaccgggtgcgatgcgcgaattgcactggcatgccacagcagcagagtgggctttcgtattaaccggccacgtccgtacgacggtgatcgatccacaaggtgcggccgaaaccaacgactttggaccgggcgacgtgtggtattttcctcgcggtcatgggcacatgctggaatgcctgggcgataaaccggcgcatttcattctgatcttcgataacggctacttctcagagtttggcaccttctctattactgactggatcggtcacacaccgaaagcgcttctcgccaagaactttggtctgcccgaatcggcttttgatgggtttcccaaaaaagaggtctattttgcacgtggcgcggttccaccagccacccctgcagcgcctttacagggactggtattgccaccactcacgcataaatacgaactcctcgaacaagaacctgcgaaagttttcaaaggtggtcgtgaatggcgcgtggatagctcgcgttttcccatttccaagactgtaaccggcgttgttcttgatttggaacccggcgcgttacgcgagcttcactggcatcctaatgctgacgagtggcaatatgtgatcgatggcaacattagtgtgacgatgttcggttctcatggccgttaccgcaccgaacagatggagaagggtgatgtcgggtatattccacaggggtatggccacagcatcgaaaatgtgggagatcgtccttgtcgcgtcttgattggctttaacacaggtaactaccaagcgatcgacttatcacagtggattgcaggtaatcccgtggatgttcttgccacgaacttctccaaacccaccagcctctttgaaaagttcccaaaacaggacgtgtttattgctcctggcaagggccaaactggccaccatcaccatcaccat

SEQ ID NO: 418 - protein, 369 aa, synthetic construct
  REGION 1..369: note = Variant of oxalate decarboxylase from Gemmata sp. SH-PL17
MGDPTFMNNVPDPLLSHKDLPTFKFALEKSKGKVIGKSSGKEATVVQLPISKGIAGVSMTLEPGAMRELHWHATAAEWAFVLTGHVRTTVIDPQGAAETNDFGPGDVWYFPRGHGHMLECLGDKPAHFILIFDNGYFSEFGTFSITDWIGHTPKALLAKNFGLPESAFDGFPKKEVYFARGAVPPATPAAPLQGLVLPPLTHKYELLEQEPAKVFKGGREWRVDSSRFPISKTVTGVVLDLEPGALRELHWHPNADEWQYVIDGNISVTMFGSHGRYRTEQMEKGDVGYIPQGYGHSIENVGDRPCRVLIGFNTGNYQAIDLSQWIAGNPVDVLATNFSKPTSLFEKFPKQDVFIAPGKGQTGHHHHHH

SEQ ID NO: 419 - DNA, 1107 bp, synthetic construct
  misc_feature 1..1107: note = Variant of oxalate decarboxylase from Gemmata sp. SH-PL17
  source 1..1107: mol_type = other DNA
atgggtgatccgacctttatgaataatgtgccagaccctctgctgtcgcataaagatttgccgacgttcaagtttgaactggaaaagagcaagggcaaagtcattgggaaaagttcgggaaaagaagcaaccgttgtccagttacctatctccaaaggcattgctggtgtgagcatgactcttgaaccgggtgcgatgcgcgaattgcactggcatgccacagcagcagagtgggctttcgtattaaccggccacgtccgtacgacggtgatcgatccacaaggtgcggccgaaaccaacgactttggaccgggcgacgtgtggtattttcctcgcggtcatgggcacatgctggaatgcctgggcgataaaccggcgcatttcattctgatcttcgataacggctacttctcagagtttggcaccttctctattactgactggatcggtcacacaccgaaagcgcttctcgccaagaactttggtctgcccgaatcggcttttgatgggtttcccaaaaaagaggtctattttgcacgtggcgcggttccaccagccacccctgcagcgcctttacagggactggtattgccaccactcacgcataaatacgaactcctcgaacaagaaccttcgaaagttttcaaaggtggtcgtgaatggcgcgtggatagcactcgttttcccatttccaagactgtaaccggcgttgttcttgatttggaacccggcgcgttacgcgagcttcactggcatcctaatgctgacgagtggcaatatgtgatcgatggcaacattagtgtgacgatgttcggttctcatggccgttaccgcaccgaacagatggagaagggtgatgtcgggtatattccacaggggtatggccacagcatcgaaaatgtgggagatcgtccttgtcgcgtcttgattggctttaacacaggtaactaccaagcgatcgacttatcacagtggattgcaggtaatcccgtggatgttcttgccacgaacttctccaaacccaccagcctctttgaaaagttcccaaaacaggacgtgtttattgctcctggcaagggccaaactggccaccatcaccatcaccat

SEQ ID NO: 420 - protein, 369 aa, synthetic construct
  REGION 1..369: note = Variant of oxalate decarboxylase from Gemmata sp. SH-PL17
MGDPTFMNNVPDPLLSHKDLPTFKFELEKSKGKVIGKSSGKEATVVQLPISKGIAGVSMTLEPGAMRELHWHATAAEWAFVLTGHVRTTVIDPQGAAETNDFGPGDVWYFPRGHGHMLECLGDKPAHFILIFDNGYFSEFGTFSITDWIGHTPKALLAKNFGLPESAFDGFPKKEVYFARGAVPPATPAAPLQGLVLPPLTHKYELLEQEPSKVFKGGREWRVDSTRFPISKTVTGVVLDLEPGALRELHWHPNADEWQYVIDGNISVTMFGSHGRYRTEQMEKGDVGYIPQGYGHSIENVGDRPCRVLIGFNTGNYQAIDLSQWIAGNPVDVLATNFSKPTSLFEKFPKQDVFIAPGKGQTGHHHHHH

SEQ ID NO: 421 - DNA, 1107 bp, synthetic construct
  misc_feature 1..1107: note = Variant of oxalate decarboxylase from Gemmata sp. SH-PL17
  source 1..1107: mol_type = other DNA
atgggtgatccgacctttatgaataatgtgccagaccatctgctgtcggacaaagatttgccgacgttcaagtttgaactggaaaagagcaagggcaaagtcattgggaaaagttcgggaaaagaagcaaccgttgtccagttacctatctccaaaggcattgctggtgtgagcatgactcttgaaccgggtgcgatgcgcgaattgcactggcatgccacagcagcagagtgggctttcgtattaaccggccacgtccgtacgacggtgatcgatccacaaggtgcggccgaaaccaacgactttggaccgggcgacgtgtggtattttcctcgcggtcatgggcacatgctggaatgcctgggcgataaaccggcgcatttcattctgatcttcgataacggctacttctcagagtttggcaccttctctattactgactggatcggtcacacaccgaaagcgcttctcgccaagaactttggtctgcccgaatcggcttttgatgggtttcccaaaaaagaggtctattttgcacgtggcgcggttccaccagccacccctgcagcgcctttacagggactgaagttgccaccactcacgcataaatacgaactcctcgaacaagaaccttcgaaagttttcaaaggtggtcgtgaatggcgcgtggatagcagtcgttttcccatttccaagactgtaaccggcgttgttcttgatttggaacccggcgcgttacgcgagcttcactggcatcctaatgctgacgagtggcaatatgtgatcgatggcaacattagtgtgacgatgttcggttctcatggccgttaccgcaccgaacagatggagaagggtgatgtcgggtatattccacaggggtatggccacagcatcgaaaatgtgggagatcgtccttgtcgcgtcttgattggctttaacacaggtaactaccaagcgatcgacttatcacagtggattgcaggtaatcccgtggatgttcttgccacgaacttctccaaacccaccagcctctttgaaaagttcccaaaacaggacgtgtttattgctcctggcaagggccaaactggccaccatcaccatcaccat

SEQ ID NO: 422 - protein, 369 aa, synthetic construct
  REGION 1..369: note = Variant of oxalate decarboxylase from Gemmata sp. SH-PL17
MGDPTFMNNVPDHLLSDKDLPTFKFELEKSKGKVIGKSSGKEATVVQLPISKGIAGVSMTLEPGAMRELHWHATAAEWAFVLTGHVRTTVIDPQGAAETNDFGPGDVWYFPRGHGHMLECLGDKPAHFILIFDNGYFSEFGTFSITDWIGHTPKALLAKNFGLPESAFDGFPKKEVYFARGAVPPATPAAPLQGLKLPPLTHKYELLEQEPSKVFKGGREWRVDSSRFPISKTVTGVVLDLEPGALRELHWHPNADEWQYVIDGNISVTMFGSHGRYRTEQMEKGDVGYIPQGYGHSIENVGDRPCRVLIGFNTGNYQAIDLSQWIAGNPVDVLATNFSKPTSLFEKFPKQDVFIAPGKGQTGHHHHHH

SEQ ID NO: 423 - DNA, 1107 bp, synthetic construct
  misc_feature 1..1107: note = Variant of oxalate decarboxylase from Gemmata sp. SH-PL17
  source 1..1107: mol_type = other DNA
atgggtgatccgacctttatgaataatgtgccagaccctctgctgtcgcataaagatttgccgacgttcaagtttgaactggaaaagagcaagggcaaagtcattgggaaaagttcgggaaaagaagcaaccgttgttcagttacctatctccaaaggcattgctggtgtgagcatgactcttgaaccgggtgcgatgcgcgaattgcactggcatgccacagcagcagagtgggctttcgtattaaccggccacgtccgtacgacggtgatcgatccacaaggtgcggccgaaaccaacgactttggaccgggcgacgtgtggtattttcctcgcggtcatgggcacatgctggaatgcctgggcgataaaccggcgcatttcattctgatcttcgataacggctacttctcagagtttggcaccttctctattactgactggatcggtcacacaccgaaagcgcttctcgccaagaactttggtctgcccgaatcggcttttgatgggtttcccaaaaaagaggtctattttgcacgtggcgcggttccaccagccacccctgcagcgcctttacagggactgaagttgccaccactcacgcataaatacgaactcctcgaacaagaacctcataaagttttcaaaggtggtcgtgaatggcgcgtggatagctcgcgttttcccatttccaagactgtaaccggcgttgttcttgatttggaacccggcgcgttacgcgagcttcactggcatcctaatgctgacgagtggcaatatgtgatcgatggcaacattagtgtgacgatgttcggttctcatggccgttaccgcaccgaacagatggagaagggtgatgtcgggtatattccacaggggtatggccacagcatcgaaaatgtgggagatcgtccttgtcgcgtcttgattggctttaacacaggtaactaccaagcgatcgacttatcacagtggattgcaggtaatcccgtggatgttcttgccacgaacttctccaaacccaccagcctctttgaaaagttcccaaaacaggacgtgtttattgctcctggcaagggccaaactggccaccatcaccatcaccat

SEQ ID NO: 424 - protein, 369 aa, synthetic construct
  REGION 1..369: note = Variant of oxalate decarboxylase from Gemmata sp. SH-PL17
MGDPTFMNNVPDPLLSHKDLPTFKFELEKSKGKVIGKSSGKEATVVQLPISKGIAGVSMTLEPGAMRELHWHATAAEWAFVLTGHVRTTVIDPQGAAETNDFGPGDVWYFPRGHGHMLECLGDKPAHFILIFDNGYFSEFGTFSITDWIGHTPKALLAKNFGLPESAFDGFPKKEVYFARGAVPPATPAAPLQGLKLPPLTHKYELLEQEPHKVFKGGREWRVDSSRFPISKTVTGVVLDLEPGALRELHWHPNADEWQYVIDGNISVTMFGSHGRYRTEQMEKGDVGYIPQGYGHSIENVGDRPCRVLIGFNTGNYQAIDLSQWIAGNPVDVLATNFSKPTSLFEKFPKQDVFIAPGKGQTGHHHHHH

SEQ ID NO: 425 - DNA, 1107 bp, synthetic construct
  misc_feature 1..1107: note = Variant of oxalate decarboxylase from Gemmata sp. SH-PL17
  source 1..1107: mol_type = other DNA
atgggtgatccgacctttatgaataatgtgccagaccctctgctgtcgcataaagatttgccgacgttcaagtttgcgctggaaaagagcaagggcaaagtcattgggaaaagttcgggaaaagaagcaaccgttgtccagttacctatctccaaaggcattgctggtgtgagcatgactcttgaaccgggtgcgatgcgcgaattgcactggcatgccacagcagcagagtgggctttcgtattaaccggccacgtccgtacgacggtgatcgatccacaaggtgcggccgaaaccaacgactttggaccgggcgacgtgtggtattttcctcgcggtcatgggcacatgctggaatgcctgggcgataaaccggcgcatttcattctgatcttcgataacggctacttctcagagtttggcaccttctctattactgactggatcggtcacacaccgaaagcgcttctcgccaagaactttggtctgcccgaatcggcttttgatgggtttcccaaaaaagaggtctattttgcacgtggcgcggttccaccagccacccctgcagcgcctttacagggactggtattgccaccactcacgcataaatacgaactcctcgaacaagaacctgcgaaagttttcaaaggtggtcgtgaatggcgcgtggatagcactcgttttcccatttccaagactgtaaccggcgttgttcttgatttggaacccggcgcgttacgcgagcttcactggcatcctaatgctgacgagtggcaatatgtgatcgatggcaacattagtgtgacgatgttcggttctcatggccgttaccgcaccgaacagatggagaagggtgatgtcgggtatattccacaggggtatggccacagcatcgaaaatgtgggagatcgtccttgtcgcgtcttgattggctttaacacaggtaactaccaagcgatcgacttatcacagtggattgcaggtaatcccgtggatgttcttgccacgaacttctccaaacccaccagcctctttgaaaagttcccaaaacaggacgtgtttattgctcctggcaagggccaaactggccaccatcaccatcaccat

SEQ ID NO: 426 - protein, 369 aa, synthetic construct
  REGION 1..369: note = Variant of oxalate decarboxylase from Gemmata sp. SH-PL17
MGDPTFMNNVPDPLLSHKDLPTFKFALEKSKGKVIGKSSGKEATVVQLPISKGIAGVSMTLEPGAMRELHWHATAAEWAFVLTGHVRTTVIDPQGAAETNDFGPGDVWYFPRGHGHMLECLGDKPAHFILIFDNGYFSEFGTFSITDWIGHTPKALLAKNFGLPESAFDGFPKKEVYFARGAVPPATPAAPLQGLVLPPLTHKYELLEQEPAKVFKGGREWRVDSTRFPISKTVTGVVLDLEPGALRELHWHPNADEWQYVIDGNISVTMFGSHGRYRTEQMEKGDVGYIPQGYGHSIENVGDRPCRVLIGFNTGNYQAIDLSQWIAGNPVDVLATNFSKPTSLFEKFPKQDVFIAPGKGQTGHHHHHH

SEQ ID NO: 427 - DNA, 1107 bp, synthetic construct
  misc_feature 1..1107: note = Variant of oxalate decarboxylase from Gemmata sp. SH-PL17
  source 1..1107: mol_type = other DNA
atgggtgatccgacctttatgaataatgtgccagaccatctgctgtcgcataaagatttgccgacgttcaagtttgaactggaaaagagcaagggcaaagtcattgggaaaagttcgggaaaagaagcaaccgttgtccagttacctatctccaaaggcattgctggtgtgagcatgcgtcttgaaccgggtgcgatgcgcgaattgcactggcatgccacagcagcagagtgggctttcgtattaaccggccacgtccgtacgacggtgatcgatccacaaggtgcggccgaaaccaacgactttggaccgggcgacgtgtggtattttcctcgcggtcatgggcacatgctggaatgcctgggcgataaaccggcgcatttcattctgatcttcgataacggctacttctcagagtttggcaccttctctattactgactggatcggtcacacaccgaaagcgcttctcgccaagaactttggtctgcccgaatcggcttttgatgggtttcccaaaaaagaggtctattttgcacgtggcgcggttccaccagccacccctgcagcgcctttacagggactgaagttgccaccactcacgcataaatacgaactcctcgaacaagaacctgcgaaagttttcaaaggtggtcgtgaatggcgcgtggatagcactcgttttcccatttccaagactgtaaccggcgttgttcttgatttggaacccggcgcgttacgcgagcttcactggcatcctaatgctgacgagtggcaatatgtgatcgatggcaacattagtgtgacgatgttcggttctcatggccgttaccgcaccgaacagatggagaagggtgatgtcgggtatattccacaggggtatggccacagcatcgaaaatgtgggagatcgtccttgtcgcgtcttgattggctttaacacaggtaactaccaagcgatcgacttatcacagtggattgcaggtaatcccgtggatgttcttgccacgaacttctccaaacccaccagcctctttgaaaagttcccaaaacaggacgtgtttattgctcctggcaagggccaaactggccaccatcaccatcaccat

SEQ ID NO: 428 - protein, 369 aa, synthetic construct
  REGION 1..369: note = Variant of oxalate decarboxylase from Gemmata sp. SH-PL17
MGDPTFMNNVPDHLLSHKDLPTFKFELEKSKGKVIGKSSGKEATVVQLPISKGIAGVSMRLEPGAMRELHWHATAAEWAFVLTGHVRTTVIDPQGAAETNDFGPGDVWYFPRGHGHMLECLGDKPAHFILIFDNGYFSEFGTFSITDWIGHTPKALLAKNFGLPESAFDGFPKKEVYFARGAVPPATPAAPLQGLKLPPLTHKYELLEQEPAKVFKGGREWRVDSTRFPISKTVTGVVLDLEPGALRELHWHPNADEWQYVIDGNISVTMFGSHGRYRTEQMEKGDVGYIPQGYGHSIENVGDRPCRVLIGFNTGNYQAIDLSQWIAGNPVDVLATNFSKPTSLFEKFPKQDVFIAPGKGQTGHHHHHH

SEQ ID NO: 429 - DNA, 1107 bp, synthetic construct
  misc_feature 1..1107: note = Variant of oxalate decarboxylase from Gemmata sp. SH-PL17
  source 1..1107: mol_type = other DNA
atgggtgatccgacctttatgaataatgtgccagaccctctgctgtcgcataaagatttgccgacgttcaagtttgaactggaaaagagcaagggcaaagtcattgggaaaagttcgggaaaagaagcaaccgttgtccagttacctatctccaaaggcattgctggtgtgagcatgacccttgaaccgggtgcgatgcgcgaattgcactggcatgccacagcagcagagtgggctttcgtattaaccggccacgtccgtacgacggtgatcgatccacaaggtgcggccgaaaccaacgactttggaccgggcgacgtgtggtattttcctcgcggtcatgggcacatgctggaatgcctgggcgataaaccggcgcatttcattctgatcttcgataacggctacttctcagagtttggcaccttctctattactgactggatcggtcacacaccgaaagcgcttctcgccaagaactttggtctgcccgaatcggcttttgatgggtttcccaaaaaagaggtctattttgcacgtggcgcggttccaccagccacccctgcagcgcctttacagggactggtattgccaccactcacgcataaatacgaactcctcgaacaagaaccttcgaaagttttcaaaggtggtcgtgaatggcgcgtggatagcagtcgttttcccatttccaagactgtaaccggcgttgttcttgatttggaacccggcgcgttacgcgagcttcactggcatcctaatgctgacgagtggcaatatgtgatcgatggcaacattagtgtgacgatgttcggttctcatggccgttaccgcaccgaacagatggagaagggtgatgtcgggtatattccacaggggtatggccacagcatcgaaaatgtgggagatcgtccttgtcgcgtcttgattggctttaacacaggtaactaccaagcgatcgacttatcacagtggattgcaggtaatcccgcggatgttcttgccacgaacttctccaaacccaccagcctctttgaaaagttcccaaaacaggacgtgtttattgctcctggcaagggccaaactggccaccatcaccatcaccat

SEQ ID NO: 430 - protein, 369 aa, synthetic construct
  REGION 1..369: note = Variant of oxalate decarboxylase from Gemmata sp. SH-PL17
MGDPTFMNNVPDPLLSHKDLPTFKFELEKSKGKVIGKSSGKEATVVQLPISKGIAGVSMTLEPGAMRELHWHATAAEWAFVLTGHVRTTVIDPQGAAETNDFGPGDVWYFPRGHGHMLECLGDKPAHFILIFDNGYFSEFGTFSITDWIGHTPKALLAKNFGLPESAFDGFPKKEVYFARGAVPPATPAAPLQGLVLPPLTHKYELLEQEPSKVFKGGREWRVDSSRFPISKTVTGVVLDLEPGALRELHWHPNADEWQYVIDGNISVTMFGSHGRYRTEQMEKGDVGYIPQGYGHSIENVGDRPCRVLIGFNTGNYQAIDLSQWIAGNPADVLATNFSKPTSLFEKFPKQDVFIAPGKGQTGHHHHHH

SEQ ID NO: 431 - DNA, 1107 bp, synthetic construct
  misc_feature 1..1107: note = Variant of oxalate decarboxylase from Gemmata sp. SH-PL17
  source 1..1107: mol_type = other DNA
atgggtgatccgacctttatgaataatgtgccagaccctctgctgtcgcataaagatttgccgacgttcaagtttgcgctggaaaagagcaagggcaaagtcattgggaaaagttcgggaaaagaagcaaccgttgttcagttacctatctccaaaggcattgctggtgtgagcatgactcttgaaccgggtgcgatgcgcgaattgcactggcatgccacagcagcagagtgggctttcgtattaaccggccacgtccgtacgacggtgatcgatccacaaggtgcggccgaaaccaacgactttggaccgggcgacgtgtggtattttcctcgcggtcatgggcacatgctggaatgcctgggcgataaaccggcgcatttcattctgatcttcgataacggctacttctcagagtttggcaccttctctattactgactggatcggtcacacaccgaaagcgcttctcgccaagaactttggtctgcccgaatcggcttttgatgggtttcccaaaaaagaggtctattttgcacgtggcgcggttccaccagccacccctgcagcgcctttacagggactggtattgccaccactcacgcataaatacgaactcctcgaacaagaacctcataaagttttcaaaggtggtcgtgaatggcgcgtggatagcagtcgttttcccatttccaagactgtaaccggcgttgttcttgatttggaacccggcgcgttacgcgagcttcactggcatcctaatgctgacgagtggcaatatgtgatcgatggcaacattagtgtgacgatgttcggttctcatggccgttaccgcaccgaacagatggagaagggtgatgtcgggtatattccacaggggtatggccacagcatcgaaaatgtgggagatcgtccttgtcgcgtcttgattggctttaacacaggtaactaccaagcgatcgacttatcacagtggattgcaggtaatcccgtggatgttcttgccacgaacttctccaaacccaccagcctctttgaaaagttcccaaaacaggacgtgtttattgctcctggcaagggccaaactggccaccatcaccatcaccat

SEQ ID NO: 432 - protein, 369 aa, synthetic construct
  REGION 1..369: note = Variant of oxalate decarboxylase from Gemmata sp. SH-PL17
MGDPTFMNNVPDPLLSHKDLPTFKFALEKSKGKVIGKSSGKEATVVQLPISKGIAGVSMTLEPGAMRELHWHATAAEWAFVLTGHVRTTVIDPQGAAETNDFGPGDVWYFPRGHGHMLECLGDKPAHFILIFDNGYFSEFGTFSITDWIGHTPKALLAKNFGLPESAFDGFPKKEVYFARGAVPPATPAAPLQGLVLPPLTHKYELLEQEPHKVFKGGREWRVDSSRFPISKTVTGVVLDLEPGALRELHWHPNADEWQYVIDGNISVTMFGSHGRYRTEQMEKGDVGYIPQGYGHSIENVGDRPCRVLIGFNTGNYQAIDLSQWIAGNPVDVLATNFSKPTSLFEKFPKQDVFIAPGKGQTGHHHHHH

SEQ ID NO: 433 - DNA, 1107 bp, synthetic construct
  misc_feature 1..1107: note = Variant of oxalate decarboxylase from Gemmata sp. SH-PL17
  source 1..1107: mol_type = other DNA
atgggtgatccgacctttatgaataatgtgccagaccctctgctgtcgcataaagatttgccgacgttcaagtttgaactggaaaagagcaagggcaaagtcattgggaaaagttcgggaaaagaagcaaccgttgttcagttacctatctccaaaggcattgctggtgtgagcatgactcttgaaccgggtgcgatgcgcgaattgcactggcatgccacagcagcagagtgggctttcgtattaaccggccacgtccgtacgacggtgatcgatccacaaggtgcggccgaaaccaacgactttggaccgggcgacgtgtggtattttcctcgcggtcatgggcacatgctggaatgcctgggcgataaaccggcgcatttcattctgatcttcgataacggctacttctcagagtttggcaccttctctattactgactggatcggtcacacaccgaaagcgcttctcgccaagaactttggtctgcccgaatcggcttttgatgggtttcccaaaaaagaggtctattttgcacgtggcgcggttccaccagccacccctgcagcgcctttacagggactggtattgccaccactcacgcataaatacgaactcctcgaacaagaacctcataaagttttcaaaggtggtcgtgaatggcgcgtggatagcagtcgttttcccatttccaagactgtaaccggcgttgttcttgatttggaacccggcgcgttacgcgagcttcactggcatcctaatgctgacgagtggcaatatgtgatcgatggcaacattagtgtgacgatgttcggttctcatggccgttaccgcaccgaacagatggagaagggtgatgtcgggtatattccacaggggtatggccacagcatcgaaaatgtgggagatcgtccttgtcgcgtcttgattggctttaacacaggtaactaccaagcgatcgacttatcacagtggattgcaggtaatcccgcggatgttcttgccacgaacttctccaaacccaccagcctctttgaaaagttcccaaaacaggacgtgtttattgctcctggcaagggccaaactggccaccatcaccatcaccat

SEQ ID NO: 434 - protein, 369 aa, synthetic construct
  REGION 1..369: note = Variant of oxalate decarboxylase from Gemmata sp. SH-PL17
MGDPTFMNNVPDPLLSHKDLPTFKFELEKSKGKVIGKSSGKEATVVQLPISKGIAGVSMTLEPGAMRELHWHATAAEWAFVLTGHVRTTVIDPQGAAETNDFGPGDVWYFPRGHGHMLECLGDKPAHFILIFDNGYFSEFGTFSITDWIGHTPKALLAKNFGLPESAFDGFPKKEVYFARGAVPPATPAAPLQGLVLPPLTHKYELLEQEPHKVFKGGREWRVDSSRFPISKTVTGVVLDLEPGALRELHWHPNADEWQYVIDGNISVTMFGSHGRYRTEQMEKGDVGYIPQGYGHSIENVGDRPCRVLIGFNTGNYQAIDLSQWIAGNPADVLATNFSKPTSLFEKFPKQDVFIAPGKGQTGHHHHHH

SEQ ID NO: 435 - DNA, 1107 bp, synthetic construct
  misc_feature 1..1107: note = Variant of oxalate decarboxylase from Gemmata sp. SH-PL17
  source 1..1107: mol_type = other DNA
atgggtgatccgacctttatgaataatgtgccagaccctctgctgtcgcataaagatttgccgacgttcaagtttgcgctggaaaagagcaagggcaaagtcattgggaaaagttcgggaaaagaagcaaccgttgtccagttacctatctccaaaggcattgctggtgtgagcatgactcttgaaccgggtgcgatgcgcgaattgcactggcatgccacagcagcagagtgggctttcgtattaaccggccacgtccgtacgacggtgatcgatccacaaggtgcggccgaaaccaacgactttggaccgggcgacgtgtggtattttcctcgcggtcatgggcacatgctggaatgcctgggcgataaaccggcgcatttcattctgatcttcgataacggctacttctcagagtttggcaccttctctattactgactggatcggtcacacaccgaaagcgcttctcgccaagaactttggtctgcccgaatcggcttttgatgggtttcccaaaaaagaggtctattttgcacgtggcgcggttccaccagccacccctgcagcgcctttacagggactgaagttgccaccactcacgcataaatacgaactcctcgaacaagaacctcataaagttttcaaaggtggtcgtgaatggcgcgtggatagctcgcgttttcccatttccaagactgtaaccggcgttgttcttgatttggaacccggcgcgttacgcgagcttcactggcatcctaatgctgacgagtggcaatatgtgatcgatggcaacattagtgtgacgatgttcggttctcatggccgttaccgcaccgaacagatggagaagggtgatgtcgggtatattccacaggggtatggccacagcatcgaaaatgtgggagatcgtccttgtcgcgtcttgattggctttaacacaggtaactaccaagcgatcgacttatcacagtggattgcaggtaatcccgcggatgttcttgccacgaacttctccaaacccaccagcctctttgaaaagttcccaaaacaggacgtgtttattgctcctggcaagggccaaactggccaccatcaccatcaccat

SEQ ID NO: 436 - protein, 369 aa, synthetic construct
  REGION 1..369: note = Variant of oxalate decarboxylase from Gemmata sp. SH-PL17
MGDPTFMNNVPDPLLSHKDLPTFKFALEKSKGKVIGKSSGKEATVVQLPISKGIAGVSMTLEPGAMRELHWHATAAEWAFVLTGHVRTTVIDPQGAAETNDFGPGDVWYFPRGHGHMLECLGDKPAHFILIFDNGYFSEFGTFSITDWIGHTPKALLAKNFGLPESAFDGFPKKEVYFARGAVPPATPAAPLQGLKLPPLTHKYELLEQEPHKVFKGGREWRVDSSRFPISKTVTGVVLDLEPGALRELHWHPNADEWQYVIDGNISVTMFGSHGRYRTEQMEKGDVGYIPQGYGHSIENVGDRPCRVLIGFNTGNYQAIDLSQWIAGNPADVLATNFSKPTSLFEKFPKQDVFIAPGKGQTGHHHHHH

SEQ ID NO: 437 - DNA, 1107 bp, synthetic construct
  misc_feature 1..1107: note = Variant of oxalate decarboxylase from Gemmata sp. SH-PL17
  source 1..1107: mol_type = other DNA
atgggtgatccgacctttatgaataatgtgccagaccatctgctgtcggacaaagatttgccgacgttcaagtttgagctggaaaagagcaagggcaaagtcattgggaaaagttcgggaaaagaagcaaccgttcgtcagttacctatctccaaaggcattgctggtgtgagcatgactcttgaaccgggtgcgatgcgcgaattgcactggcatgccacagcagcagagtgggctttcgtattaaccggccacgtccgtacgacggtgatcgatccacaaggtgcggccgaaaccaacgactttggaccgggcgacgtgtggtattttcctcgcggtcatgggcacatgctggaatgcctgggcgataaaccggcgcatttcattctgatcttcgataacggctacttctcagagtttggcaccttctctattactgactggatcggtcacacaccgaaagcgcttctcgccaagaactttggtctgcccgaatcggcttttgatgggtttcccaaaaaagaggtctattttgcacgtggcgcggttccaccagccacccctgcagcgcctttacagggactgaagttgccaccactcacgcataaatacgaactcctcgaacaagaaccttcgaaagttttcaaaggtggtcgtgaatggcgcgtggatagcactcgttttcccatttccaagactgtaaccggcgttgttcttgatttggaacccggcgcgttacgcgagcttcactggcatcctaatgctgacgagtggcaatatgtgatcgatggcaacattagtgtgacgatgttcggttctcatggccgttaccgcaccgaacagatggagaagggtgatgtcgggtatattccacaggggtatggccacagcatcgaaaatgtgggagatcgtccttgtcgcgtcttgattggctttaacacaggtaactaccaagcgatcgacttatcacagtggattgcaggtaatcccgcggatgttcttgccacgaacttctccaaacccaccagcctctttgaaaagttcccaaaacaggacgtgtttattgctcctggcaagggccaaactggccaccatcaccatcaccat

SEQ ID NO: 438 - protein, 369 aa, synthetic construct
  REGION 1..369: note = Variant of oxalate decarboxylase from Gemmata sp. SH-PL17
MGDPTFMNNVPDHLLSDKDLPTFKFELEKSKGKVIGKSSGKEATVRQLPISKGIAGVSMTLEPGAMRELHWHATAAEWAFVLTGHVRTTVIDPQGAAETNDFGPGDVWYFPRGHGHMLECLGDKPAHFILIFDNGYFSEFGTFSITDWIGHTPKALLAKNFGLPESAFDGFPKKEVYFARGAVPPATPAAPLQGLKLPPLTHKYELLEQEPSKVFKGGREWRVDSTRFPISKTVTGVVLDLEPGALRELHWHPNADEWQYVIDGNISVTMFGSHGRYRTEQMEKGDVGYIPQGYGHSIENVGDRPCRVLIGFNTGNYQAIDLSQWIAGNPADVLATNFSKPTSLFEKFPKQDVFIAPGKGQTGHHHHHH

SEQ ID NO: 439 - DNA, 1107 bp, synthetic construct
  misc_feature 1..1107: note = Variant of oxalate decarboxylase from Gemmata sp. SH-PL17
  source 1..1107: mol_type = other DNA
atgggtgatccgacctttatgaataatgtgccagaccatctgctgtcgcataaagatttgccgacgttcaagtttgagctggaaaagagcaagggcaaagtcattgggaaaagttcgggaaaagaagcaaccgttgtccagttacctatctccaaaggcattgctggtgtgagcatgcgtcttgaaccgggtgcgatgcgcgaattgcactggcatgccacagcagcagagtgggctttcgtattaaccggccacgtccgtacgacggtgatcgatccacaaggtgcggccgaaaccaacgactttggaccgggcgacgtgtggtattttcctcgcggtcatgggcacatgctggaatgcctgggcgataaaccggcgcatttcattctgatcttcgataacggctacttctcagagtttggcaccttctctattactgactggatcggtcacacaccgaaagcgcttctcgccaagaactttggtctgcccgaatcggcttttgatgggtttcccaaaaaagaggtctattttgcacgtggcgcggttccaccagccacccctgcagcgcctttacagggactgaagttgccaccactcacgcataaatacgaactcctcgaacaagaacctcataaagttttcaaaggtggtcgtgaatggcgcgtggatagctcgcgttttcccatttccaagactgtaaccggcgttgttcttgatttggaacccggcgcgttacgcgagcttcactggcatcctaatgctgacgagtggcaatatgtgatcgatggcaacattagtgtgacgatgttcggttctcatggccgttaccgcaccgaacagatggagaagggtgatgtcgggtatattccacaggggtatggccacagcatcgaaaatgtgggagatcgtccttgtcgcgtcttgattggctttaacacaggtaactaccaagcgatcgacttatcacagtggattgcaggtaatcccgcggatgttcttgccacgaacttctccaaacccaccagcctctttgaaaagttcccaaaacaggacgtgtttattgctcctggcaagggccaaactggccaccatcaccatcaccat

SEQ ID NO: 440 - protein, 369 aa, synthetic construct
  REGION 1..369: note = Variant of oxalate decarboxylase from Gemmata sp. SH-PL17
MGDPTFMNNVPDHLLSHKDLPTFKFELEKSKGKVIGKSSGKEATVVQLPISKGIAGVSMRLEPGAMRELHWHATAAEWAFVLTGHVRTTVIDPQGAAETNDFGPGDVWYFPRGHGHMLECLGDKPAHFILIFDNGYFSEFGTFSITDWIGHTPKALLAKNFGLPESAFDGFPKKEVYFARGAVPPATPAAPLQGLKLPPLTHKYELLEQEPHKVFKGGREWRVDSSRFPISKTVTGVVLDLEPGALRELHWHPNADEWQYVIDGNISVTMFGSHGRYRTEQMEKGDVGYIPQGYGHSIENVGDRPCRVLIGFNTGNYQAIDLSQWIAGNPADVLATNFSKPTSLFEKFPKQDVFIAPGKGQTGHHHHHH

SEQ ID NO: 441 - DNA, 1107 bp, synthetic construct
  misc_feature 1..1107: note = Variant of oxalate decarboxylase from Gemmata sp. SH-PL17
  source 1..1107: mol_type = other DNA
atgggtgatccgacctttatgaataatgtgccagaccatctgctgtcgcataaagatttgccgacgttcaagtttgaactggaaaagagcaagggcaaagtcattgggaaaagttcgggaaaagaagcaaccgttgtccagttacctatctccaaaggcattgctggtgtgagcatgactcttgaaccgggtgcgatgcgcgaattgcactggcatgccacagcagcagagtgggctttcgtattaaccggccacgtccgtacgacggtgatcgatccacaaggtgcggccgaaaccaacgactttggaccgggcgacgtgtggtattttcctcgcggtcatgggcacatgctggaatgcctgggcgataaaccggcgcatttcattctgatcttcgataacggctacttctcagagtttggcaccttctctattactgactggatcggtcacacaccgaaagcgcttctcgccaagaactttggtctgcccgaatcggcttttgatgggtttcccaaaaaagaggtctattttgcacgtggcgcggttccaccagccacccctgcagcgcctttacagggactgaagttgccaccactcacgcataaatacgaactcctcgaacaagaacctcataaagttttcaaaggtggtcgtgaatggcgcgtggatagcagtcgttttcccatttccaagactgtaaccggcgttgttcttgatttggaacccggcgcgttacgcgagcttcactggcatcctaatgctgacgagtggcaatatgtgatcgatggcaacattagtgtgacgatgttcggttctcatggccgttaccgcaccgaacagatggagaagggtgatgtcgggtatattccacaggggtatggccacagcatcgaaaatgtgggagatcgtccttgtcgcgtcttgattggctttaacacaggtaactaccaagcgatcgacttatcacagtggattgcaggtaatcccgtggatgttcttgccacgaacttctccaaacccaccagcctctttgaaaagttcccaaaacaggacgtgtttattgctcctggcaagggccaaactggccaccatcaccatcaccat

SEQ ID NO: 442 - protein, 369 aa, synthetic construct
  REGION 1..369: note = Variant of oxalate decarboxylase from Gemmata sp. SH-PL17
MGDPTFMNNVPDHLLSHKDLPTFKFELEKSKGKVIGKSSGKEATVVQLPISKGIAGVSMTLEPGAMRELHWHATAAEWAFVLTGHVRTTVIDPQGAAETNDFGPGDVWYFPRGHGHMLECLGDKPAHFILIFDNGYFSEFGTFSITDWIGHTPKALLAKNFGLPESAFDGFPKKEVYFARGAVPPATPAAPLQGLKLPPLTHKYELLEQEPHKVFKGGREWRVDSSRFPISKTVTGVVLDLEPGALRELHWHPNADEWQYVIDGNISVTMFGSHGRYRTEQMEKGDVGYIPQGYGHSIENVGDRPCRVLIGFNTGNYQAIDLSQWIAGNPVDVLATNFSKPTSLFEKFPKQDVFIAPGKGQTGHHHHHH

SEQ ID NO: 443 - DNA, 1107 bp, synthetic construct
  misc_feature 1..1107: note = Variant of oxalate decarboxylase from Gemmata sp. SH-PL17
  source 1..1107: mol_type = other DNA
atgggtgatccgacctttatgaataatgtgccagaccctctgctgtcgcataaagatttgccgacgttcaagtttgagctggaaaagagcaagggcaaagtcattgggaaaagttcgggaaaagaagcaaccgttcgtcagttacctatctccaaaggcattgctggtgtgagcatgactcttgaaccgggtgcgatgcgcgaattgcactggcatgccacagcagcagagtgggctttcgtattaaccggccacgtccgtacgacggtgatcgatccacaaggtgcggccgaaaccaacgactttggaccgggcgacgtgtggtattttcctcgcggtcatgggcacatgctggaatgcctgggcgataaaccggcgcatttcattctgatcttcgataacggctacttctcagagtttggcaccttctctattactgactggatcggtcacacaccgaaagcgcttctcgccaagaactttggtctgcccgaatcggcttttgatgggtttcccaaaaaagaggtctattttgcacgtggcgcggttccaccagccacccctgcagcgcctttacagggactggtattgccaccactcacgcataaatacgaactcctcgaacaagaacctcataaagttttcaaaggtggtcgtgaatggcgcgtggatagcactcgttttcccatttccaagactgtaaccggcgttgttcttgatttggaacccggcgcgttacgcgagcttcactggcatcctaatgctgacgagtggcaatatgtgatcgatggcaacattagtgtgacgatgttcggttctcatggccgttaccgcaccgaacagatggagaagggtgatgtcgggtatattccacaggggtatggccacagcatcgaaaatgtgggagatcgtccttgtcgcgtcttgattggctttaacacaggtaactaccaagcgatcgacttatcacagtggattgcaggtaatcccgtggatgttcttgccacgaacttctccaaacccaccagcctctttgaaaagttcccaaaacaggacgtgtttattgctcctggcaagggccaaactggccaccatcaccatcaccat

SEQ ID NO: 444 - protein, 369 aa, synthetic construct
  REGION 1..369: note = Variant of oxalate decarboxylase from Gemmata sp. SH-PL17
MGDPTFMNNVPDPLLSHKDLPTFKFELEKSKGKVIGKSSGKEATVRQLPISKGIAGVSMTLEPGAMRELHWHATAAEWAFVLTGHVRTTVIDPQGAAETNDFGPGDVWYFPRGHGHMLECLGDKPAHFILIFDNGYFSEFGTFSITDWIGHTPKALLAKNFGLPESAFDGFPKKEVYFARGAVPPATPAAPLQGLVLPPLTHKYELLEQEPHKVFKGGREWRVDSTRFPISKTVTGVVLDLEPGALRELHWHPNADEWQYVIDGNISVTMFGSHGRYRTEQMEKGDVGYIPQGYGHSIENVGDRPCRVLIGFNTGNYQAIDLSQWIAGNPVDVLATNFSKPTSLFEKFPKQDVFIAPGKGQTGHHHHHH

SEQ ID NO: 445 - DNA, 1107 bp, synthetic construct
  misc_feature 1..1107: note = Variant of oxalate decarboxylase from Gemmata sp. SH-PL17
  source 1..1107: mol_type = other DNA
atgggtgatccgacctttatgaataatgtgccagaccatctgctgtcgcataaagatttgccgacgttcaagtttgagctggaaaagagcaagggcaaagtcattgggaaaagttcgggaaaagaagcaaccgttgttcagttacctatctccaaaggcattgctggtgtgagcatgactcttgaaccgggtgcgatgcgcgaattgcactggcatgccacagcagcagagtgggctttcgtattaaccggccacgtccgtacgacggtgatcgatccacaaggtgcggccgaaaccaacgactttggaccgggcgacgtgtggtattttcctcgcggtcatgggcacatgctggaatgcctgggcgataaaccggcgcatttcattctgatcttcgataacggctacttctcagagtttggcaccttctctattactgactggatcggtcacacaccgaaagcgcttctcgccaagaactttggtctgcccgaatcggcttttgatgggtttcccaaaaaagaggtctattttgcacgtggcgcggttccaccagccacccctgcagcgcctttacagggactgaagttgccaccactcacgcataaatacgaactcctcgaacaagaacctcataaagttttcaaaggtggtcgtgaatggcgcgtggatagcactcgttttcccatttccaagactgtaaccggcgttgttcttgatttggaacccggcgcgttacgcgagcttcactggcatcctaatgctgacgagtggcaatatgtgatcgatggcaacattagtgtgacgatgttcggttctcatggccgttaccgcaccgaacagatggagaagggtgatgtcgggtatattccacaggggtatggccacagcatcgaaaatgtgggagatcgtccttgtcgcgtcttgattggctttaacacaggtaactaccaagcgatcgacttatcacagtggattgcaggtaatcccgtggatgttcttgccacgaacttctccaaacccaccagcctctttgaaaagttcccaaaacaggacgtgtttattgctcctggcaagggccaaactggccaccatcaccatcaccat

SEQ ID NO: 446 - protein, 369 aa, synthetic construct
  REGION 1..369: note = Variant of oxalate decarboxylase from Gemmata sp. SH-PL17
MGDPTFMNNVPDHLLSHKDLPTFKFELEKSKGKVIGKSSGKEATVVQLPISKGIAGVSMTLEPGAMRELHWHATAAEWAFVLTGHVRTTVIDPQGAAETNDFGPGDVWYFPRGHGHMLECLGDKPAHFILIFDNGYFSEFGTFSITDWIGHTPKALLAKNFGLPESAFDGFPKKEVYFARGAVPPATPAAPLQGLKLPPLTHKYELLEQEPHKVFKGGREWRVDSTRFPISKTVTGVVLDLEPGALRELHWHPNADEWQYVIDGNISVTMFGSHGRYRTEQMEKGDVGYIPQGYGHSIENVGDRPCRVLIGFNTGNYQAIDLSQWIAGNPVDVLATNFSKPTSLFEKFPKQDVFIAPGKGQTGHHHHHH

SEQ ID NO: 447 - DNA, 1107 bp, synthetic construct
  misc_feature 1..1107: note = Variant of oxalate decarboxylase from Gemmata sp. SH-PL17
  source 1..1107: mol_type = other DNA
atgggtgatccgacctttatgaataatgtgccagaccatctgctgtcgcataaagatttgccgacgttcaagtttgagctggaaaagagcaagggcaaagtcattgggaaaagttcgggaaaagaagcaaccgttgtccagttacctatctccaaaggcattgctggtgtgagcatggtgcttgaaccgggtgcgatgcgcgaattgcactggcatgccacagcagcagagtgggctttcgtattaaccggccacgtccgtacgacggtgatcgatccacaaggtgcggccgaaaccaacgactttggaccgggcgacgtgtggtattttcctcgcggtcatgggcacatgctggaatgcctgggcgataaaccggcgcatttcattctgatcttcgataacggctacttctcagagtttggcaccttctctattactgactggatcggtcacacaccgaaagcgcttctcgccaagaactttggtctgcccgaatcggcttttgatgggtttcccaaaaaagaggtctattttgcacgtggcgcggttccaccagccacccctgcagcgcctttacagggactgaagttgccaccactcacgcataaatacgaactcctcgaacaagaacctcataaagttttcaaaggtggtcgtgaatggcgcgtggatagcactcgttttcccatttccaagactgtaaccggcgttgttcttgatttggaacccggcgcgttacgcgagcttcactggcatcctaatgctgacgagtggcaatatgtgatcgatggcaacattagtgtgacgatgttcggttctcatggccgttaccgcaccgaacagatggagaagggtgatgtcgggtatattccacaggggtatggccacagcatcgaaaatgtgggagatcgtccttgtcgcgtcttgattggctttaacacaggtaactaccaagcgatcgacttatcacagtggattgcaggtaatcccgcggatgttcttgccacgaacttctccaaacccaccagcctctttgaaaagttcccaaaacaggacgtgtttattgctcctggcaagggccaaactggccaccatcaccatcaccat

SEQ ID NO: 448 - protein, 369 aa, synthetic construct
  REGION 1..369: note = Variant of oxalate decarboxylase from Gemmata sp. SH-PL17
MGDPTFMNNVPDHLLSHKDLPTFKFELEKSKGKVIGKSSGKEATVVQLPISKGIAGVSMVLEPGAMRELHWHATAAEWAFVLTGHVRTTVIDPQGAAETNDFGPGDVWYFPRGHGHMLECLGDKPAHFILIFDNGYFSEFGTFSITDWIGHTPKALLAKNFGLPESAFDGFPKKEVYFARGAVPPATPAAPLQGLKLPPLTHKYELLEQEPHKVFKGGREWRVDSTRFPISKTVTGVVLDLEPGALRELHWHPNADEWQYVIDGNISVTMFGSHGRYRTEQMEKGDVGYIPQGYGHSIENVGDRPCRVLIGFNTGNYQAIDLSQWIAGNPADVLATNFSKPTSLFEKFPKQDVFIAPGKGQTGHHHHHH

SEQ ID NO: 449 - DNA, 1107 bp, synthetic construct
  misc_feature 1..1107: note = Variant of oxalate decarboxylase from Gemmata sp. SH-PL17
  source 1..1107: mol_type = other DNA
atgggtgatccgacctttatgaataatgtgccagaccatctgctgtcgcataaagatttgccgacgttcaagtttgagctggaaaagagcaagggcaaagtcattgggaaaagttcgggaaaagaagcaaccgttcgtcagttacctatctccaaaggcattgctggtgtgagcatgactcttgaaccgggtgcgatgcgcgaattgcactggcatgccacagcagcagagtgggctttcgtattaaccggccacgtccgtacgacggtgatcgatccacaaggtgcggccgaaaccaacgactttggaccgggcgacgtgtggtattttcctcgcggtcatgggcacatgctggaatgcctgggcgataaaccggcgcatttcattctgatcttcgataacggctacttctcagagtttggcaccttctctattactgactggatcggtcacacaccgaaagcgcttctcgccaagaactttggtctgcccgaatcggcttttgatgggtttcccaaaaaagaggtctattttgcacgtggcgcggttccaccagccacccctgcagcgcctttacagggactgaagttgccaccactcacgcataaatacgaactcctcgaacaagaaccttcgaaagttttcaaaggtggtcgtgaatggcgcgtggatagctcgcgttttcccatttccaagactgtaaccggcgttgttcttgatttggaacccggcgcgttacgcgagcttcactggcatcctaatgctgacgagtggcaatatgtgatcgatggcaacattagtgtgacgatgttcggttctcatggccgttaccgcaccgaacagatggagaagggtgatgtcgggtatattccacaggggtatggccacagcatcgaaaatgtgggagatcgtccttgtcgcgtcttgattggctttaacacaggtaactaccaagcgatcgacttatcacagtggattgcaggtaatcccgtggatgttcttgccacgaacttctccaaacccaccagcctctttgaaaagttcccaaaacaggacgtgtttattgctcctggcaagggccaaactggccaccatcaccatcaccat

SEQ ID NO: 450 - protein, 369 aa, synthetic construct
  REGION 1..369: note = Variant of oxalate decarboxylase from Gemmata sp. SH-PL17
MGDPTFMNNVPDHLLSHKDLPTFKFELEKSKGKVIGKSSGKEATVRQLPISKGIAGVSMTLEPGAMRELHWHATAAEWAFVLTGHVRTTVIDPQGAAETNDFGPGDVWYFPRGHGHMLECLGDKPAHFILIFDNGYFSEFGTFSITDWIGHTPKALLAKNFGLPESAFDGFPKKEVYFARGAVPPATPAAPLQGLKLPPLTHKYELLEQEPSKVFKGGREWRVDSSRFPISKTVTGVVLDLEPGALRELHWHPNADEWQYVIDGNISVTMFGSHGRYRTEQMEKGDVGYIPQGYGHSIENVGDRPCRVLIGFNTGNYQAIDLSQWIAGNPVDVLATNFSKPTSLFEKFPKQDVFIAPGKGQTGHHHHHH

SEQ ID NO: 451 - DNA, 1107 bp, synthetic construct
  misc_feature 1..1107: note = Variant of oxalate decarboxylase from Gemmata sp. SH-PL17
  source 1..1107: mol_type = other DNA
atgggtgatccgacctttatgaataatgtgccagaccctctgctgtcgcataaagatttgccgacgttcaagtttgaactggaaaagagcaagggcaaagtcattgggaaaagttcgggaaaagaagcaaccgttgtccagttacctatctccaaaggcattgctggtgtgagcatgacccttgaaccgggtgcgatgcgcgaattgcactggcatgccacagcagcagagtgggctttcgtattaaccggccacgtccgtacgacggtgatcgatccacaaggtgcggccgaaaccaacgactttggaccgggcgacgtgtggtattttcctcgcggtcatgggcacatgctggaatgcctgggcgataaaccggcgcatttcattctgatcttcgataacggctacttctcagagtttggcaccttctctattactgactggatcggtcacacaccgaaagcgcttctcgccaagaactttggtctgcccgaatcggcttttgatgggtttcccaaaaaagaggtctattttgcacgtggcgcggttccaccagccacccctgcagcgcctttacagggactggtattgccaccactcacgcataaatacgaactcctcgaacaagaacctgcgaaagttttcaaaggtggtcgtgaatggcgcgtggatagcagtcgttttcccatttccaagactgtaaccggcgttgttcttgatttggaacccggcgcgttacgcgagcttcactggcatcctaatgctgacgagtggcaatatgtgatcgatggcaacattagtgtgacgatgttcggttctcatggccgttaccgcaccgaacagatggagaagggtgatgtcgggtatattccacaggggtatggccacagcatcgaaaatgtgggagatcgtccttgtcgcgtcttgattggctttaacacaggtaactaccaagcgatcgacttatcacagtggattgcaggtaatcccgcggatgttcttgccacgaacttctccaaacccaccagcctctttgaaaagttcccaaaacaggacgtgtttattgctcctggcaagggccaaactggccaccatcaccatcaccat

SEQ ID NO: 452 - protein, 369 aa, synthetic construct
  REGION 1..369: note = Variant of oxalate decarboxylase from Gemmata sp. SH-PL17
MGDPTFMNNVPDPLLSHKDLPTFKFELEKSKGKVIGKSSGKEATVVQLPISKGIAGVSMTLEPGAMRELHWHATAAEWAFVLTGHVRTTVIDPQGAAETNDFGPGDVWYFPRGHGHMLECLGDKPAHFILIFDNGYFSEFGTFSITDWIGHTPKALLAKNFGLPESAFDGFPKKEVYFARGAVPPATPAAPLQGLVLPPLTHKYELLEQEPAKVFKGGREWRVDSSRFPISKTVTGVVLDLEPGALRELHWHPNADEWQYVIDGNISVTMFGSHGRYRTEQMEKGDVGYIPQGYGHSIENVGDRPCRVLIGFNTGNYQAIDLSQWIAGNPADVLATNFSKPTSLFEKFPKQDVFIAPGKGQTGHHHHHH

SEQ ID NO: 453 - DNA, 1107 bp, synthetic construct
  misc_feature 1..1107: note = Variant of oxalate decarboxylase from Gemmata sp. SH-PL17
  source 1..1107: mol_type = other DNA
atgggtgatccgacctttatgaataatgtgccagaccatctgctgtcgcataaagatttgccgacgttcaagtttgagctggaaaagagcaagggcaaagtcattgggaaaagttcgggaaaagaagcaaccgttcgtcagttacctatctccaaaggcattgctggtgtgagcatgactcttgaaccgggtgcgatgcgcgaattgcactggcatgccacagcagcagagtgggctttcgtattaaccggccacgtccgtacgacggtgatcgatccacaaggtgcggccgaaaccaacgactttggaccgggcgacgtgtggtattttcctcgcggtcatgggcacatgctggaatgcctgggcgataaaccggcgcatttcattctgatcttcgataacggctacttctcagagtttggcaccttctctattactgactggatcggtcacacaccgaaagcgcttctcgccaagaactttggtctgcccgaatcggcttttgatgggtttcccaaaaaagaggtctattttgcacgtggcgcggttccaccagccacccctgcagcgcctttacagggactggtattgccaccactcacgcataaatacgaactcctcgaacaagaaccttcgaaagttttcaaaggtggtcgtgaatggcgcgtggatagcagtcgttttcccatttccaagactgtaaccggcgttgttcttgatttggaacccggcgcgttacgcgagcttcactggcatcctaatgctgacgagtggcaatatgtgatcgatggcaacattagtgtgacgatgttcggttctcatggccgttaccgcaccgaacagatggagaagggtgatgtcgggtatattccacaggggtatggccacagcatcgaaaatgtgggagatcgtccttgtcgcgtcttgattggctttaacacaggtaactaccaagcgatcgacttatcacagtggattgcaggtaatcccgtggatgttcttgccacgaacttctccaaacccaccagcctctttgaaaagttcccaaaacaggacgtgtttattgctcctggcaagggccaaactggccaccatcaccatcaccat

SEQ ID NO: 454 - protein, 369 aa, synthetic construct
  REGION 1..369: note = Variant of oxalate decarboxylase from Gemmata sp. SH-PL17
MGDPTFMNNVPDHLLSHKDLPTFKFELEKSKGKVIGKSSGKEATVRQLPISKGIAGVSMTLEPGAMRELHWHATAAEWAFVLTGHVRTTVIDPQGAAETNDFGPGDVWYFPRGHGHMLECLGDKPAHFILIFDNGYFSEFGTFSITDWIGHTPKALLAKNFGLPESAFDGFPKKEVYFARGAVPPATPAAPLQGLVLPPLTHKYELLEQEPSKVFKGGREWRVDSSRFPISKTVTGVVLDLEPGALRELHWHPNADEWQYVIDGNISVTMFGSHGRYRTEQMEKGDVGYIPQGYGHSIENVGDRPCRVLIGFNTGNYQAIDLSQWIAGNPVDVLATNFSKPTSLFEKFPKQDVFIAPGKGQTGHHHHHH

SEQ ID NO: 455 - DNA, 1107 bp, synthetic construct
  misc_feature 1..1107: note = Variant of oxalate decarboxylase from Gemmata sp. SH-PL17
  source 1..1107: mol_type = other DNA
atgggtgatccgacctttatgaataatgtgccagaccatctgctgtcgcataaagatttgccgacgttcaagtttgaactggaaaagagcaagggcaaagtcattgggaaaagttcgggaaaagaagcaaccgttgttcagttacctatctccaaaggcattgctggtgtgagcatgactcttgaaccgggtgcgatgcgcgaattgcactggcatgccacagcagcagagtgggctttcgtattaaccggccacgtccgtacgacggtgatcgatccacaaggtgcggccgaaaccaacgactttggaccgggcgacgtgtggtattttcctcgcggtcatgggcacatgctggaatgcctgggcgataaaccggcgcatttcattctgatcttcgataacggctacttctcagagtttggcaccttctctattactgactggatcggtcacacaccgaaagcgcttctcgccaagaactttggtctgcccgaatcggcttttgatgggtttcccaaaaaagaggtctattttgcacgtggcgcggttccaccagccacccctgcagcgcctttacagggactgaagttgccaccactcacgcataaatacgaactcctcgaacaagaacctcataaagttttcaaaggtggtcgtgaatggcgcgtggatagctcgcgttttcccatttccaagactgtaaccggcgttgttcttgatttggaacccggcgcgttacgcgagcttcactggcatcctaatgctgacgagtggcaatatgtgatcgatggcaacattagtgtgacgatgttcggttctcatggccgttaccgcaccgaacagatggagaagggtgatgtcgggtatattccacaggggtatggccacagcatcgaaaatgtgggagatcgtccttgtcgcgtcttgattggctttaacacaggtaactaccaagcgatcgacttatcacagtggattgcaggtaatcccgcggatgttcttgccacgaacttctccaaacccaccagcctctttgaaaagttcccaaaacaggacgtgtttattgctcctggcaagggccaaactggccaccatcaccatcaccat

SEQ ID NO: 456 - protein, 369 aa, synthetic construct
  REGION 1..369: note = Variant of oxalate decarboxylase from Gemmata sp. SH-PL17
MGDPTFMNNVPDHLLSHKDLPTFKFELEKSKGKVIGKSSGKEATVVQLPISKGIAGVSMTLEPGAMRELHWHATAAEWAFVLTGHVRTTVIDPQGAAETNDFGPGDVWYFPRGHGHMLECLGDKPAHFILIFDNGYFSEFGTFSITDWIGHTPKALLAKNFGLPESAFDGFPKKEVYFARGAVPPATPAAPLQGLKLPPLTHKYELLEQEPHKVFKGGREWRVDSSRFPISKTVTGVVLDLEPGALRELHWHPNADEWQYVIDGNISVTMFGSHGRYRTEQMEKGDVGYIPQGYGHSIENVGDRPCRVLIGFNTGNYQAIDLSQWIAGNPADVLATNFSKPTSLFEKFPKQDVFIAPGKGQTGHHHHHH

SEQ ID NO: 457 - DNA, 1107 bp, synthetic construct
  misc_feature 1..1107: note = Variant of oxalate decarboxylase from Gemmata sp. SH-PL17
  source 1..1107: mol_type = other DNA
atgggtgatccgacctttatgaataatgtgccagaccctctgctgtcgcataaagatttgccgacgttcaagtttgagctggaaaagagcaagggcaaagtcattgggaaaagttcgggaaaagaagcaaccgttgtccagttacctatctccaaaggcattgctggtgtgagcatgactcttgaaccgggtgcgatgcgcgaattgcactggcatgccacagcagcagagtgggctttcgtattaaccggccacgtccgtacgacggtgatcgatccacaaggtgcggccgaaaccaacgactttggaccgggcgacgtgtggtattttcctcgcggtcatgggcacatgctggaatgcctgggcgataaaccggcgcatttcattctgatcttcgataacggctacttctcagagtttggcaccttctctattactgactggatcggtcacacaccgaaagcgcttctcgccaagaactttggtctgcccgaatcggcttttgatgggtttcccaaaaaagaggtctattttgcacgtggcgcggttccaccagccacccctgcagcgcctttacagggactggtattgccaccactcacgcataaatacgaactcctcgaacaagaaccttcgaaagttttcaaaggtggtcgtgaatggcgcgtggatagcactcgttttcccatttccaagactgtaaccggcgttgttcttgatttggaacccggcgcgttacgcgagcttcactggcatcctaatgctgacgagtggcaatatgtgatcgatggcaacattagtgtgacgatgttcggttctcatggccgttaccgcaccgaacagatggagaagggtgatgtcgggtatattccacaggggtatggccacagcatcgaaaatgtgggagatcgtccttgtcgcgtcttgattggctttaacacaggtaactaccaagcgatcgacttatcacagtggattgcaggtaatcccgcggatgttcttgccacgaacttctccaaacccaccagcctctttgaaaagttcccaaaacaggacgtgtttattgctcctggcaagggccaaactggccaccatcaccatcaccat

SEQ ID NO: 458 - protein, 369 aa, synthetic construct
  REGION 1..369: note = Variant of oxalate decarboxylase from Gemmata sp. SH-PL17
MGDPTFMNNVPDPLLSHKDLPTFKFELEKSKGKVIGKSSGKEATVVQLPISKGIAGVSMTLEPGAMRELHWHATAAEWAFVLTGHVRTTVIDPQGAAETNDFGPGDVWYFPRGHGHMLECLGDKPAHFILIFDNGYFSEFGTFSITDWIGHTPKALLAKNFGLPESAFDGFPKKEVYFARGAVPPATPAAPLQGLVLPPLTHKYELLEQEPSKVFKGGREWRVDSTRFPISKTVTGVVLDLEPGALRELHWHPNADEWQYVIDGNISVTMFGSHGRYRTEQMEKGDVGYIPQGYGHSIENVGDRPCRVLIGFNTGNYQAIDLSQWIAGNPADVLATNFSKPTSLFEKFPKQDVFIAPGKGQTGHHHHHH

SEQ ID NO: 459 - DNA, 1107 bp, synthetic construct
  misc_feature 1..1107: note = Variant of oxalate decarboxylase from Gemmata sp. SH-PL17
  source 1..1107: mol_type = other DNA
atgggtgatccgacctttatgaataatgtgccagaccatctgctgtcgcataaagatttgccgacgttcaagtttgagctggaaaagagcaagggcaaagtcattgggaaaagttcgggaaaagaagcaaccgttgttcagttacctatctccaaaggcattgctggtgtgagcatgacccttgaaccgggtgcgatgcgcgaattgcactggcatgccacagcagcagagtgggctttcgtattaaccggccacgtccgtacgacggtgatcgatccacaaggtgcggccgaaaccaacgactttggaccgggcgacgtgtggtattttcctcgcggtcatgggcacatgctggaatgcctgggcgataaaccggcgcatttcattctgatcttcgataacggctacttctcagagtttggcaccttctctattactgactggatcggtcacacaccgaaagcgcttctcgccaagaactttggtctgcccgaatcggcttttgatgggtttcccaaaaaagaggtctattttgcacgtggcgcggttccaccagccacccctgcagcgcctttacagggactggtattgccaccactcacgcataaatacgaactcctcgaacaagaaccttcgaaagttttcaaaggtggtcgtgaatggcgcgtggatagctcgcgttttcccatttccaagactgtaaccggcgttgttcttgatttggaacccggcgcgttacgcgagcttcactggcatcctaatgctgacgagtggcaatatgtgatcgatggcaacattagtgtgacgatgttcggttctcatggccgttaccgcaccgaacagatggagaagggtgatgtcgggtatattccacaggggtatggccacagcatcgaaaatgtgggagatcgtccttgtcgcgtcttgattggctttaacacaggtaactaccaagcgatcgacttatcacagtggattgcaggtaatcccgcggatgttcttgccacgaacttctccaaacccaccagcctctttgaaaagttcccaaaacaggacgtgtttattgctcctggcaagggccaaactggccaccatcaccatcaccat

SEQ ID NO: 460 - protein, 369 aa, synthetic construct
  REGION 1..369: note = Variant of oxalate decarboxylase from Gemmata sp. SH-PL17
MGDPTFMNNVPDHLLSHKDLPTFKFELEKSKGKVIGKSSGKEATVVQLPISKGIAGVSMTLEPGAMRELHWHATAAEWAFVLTGHVRTTVIDPQGAAETNDFGPGDVWYFPRGHGHMLECLGDKPAHFILIFDNGYFSEFGTFSITDWIGHTPKALLAKNFGLPESAFDGFPKKEVYFARGAVPPATPAAPLQGLVLPPLTHKYELLEQEPSKVFKGGREWRVDSSRFPISKTVTGVVLDLEPGALRELHWHPNADEWQYVIDGNISVTMFGSHGRYRTEQMEKGDVGYIPQGYGHSIENVGDRPCRVLIGFNTGNYQAIDLSQWIAGNPADVLATNFSKPTSLFEKFPKQDVFIAPGKGQTGHHHHHH

SEQ ID NO: 461 - DNA, 1107 bp, synthetic construct
  misc_feature 1..1107: note = Variant of oxalate decarboxylase from Gemmata sp. SH-PL17
  source 1..1107: mol_type = other DNA
atgggtgatccgacctttatgaataatgtgccagaccatctgctgtcgcataaagatttgccgacgttcaagtttgcgctggaaaagagcaagggcaaagtcattgggaaaagttcgggaaaagaagcaaccgttgtccagttacctatctccaaaggcattgctggtgtgagcatgactcttgaaccgggtgcgatgcgcgaattgcactggcatgccacagcagcagagtgggctttcgtattaaccggccacgtccgtacgacggtgatcgatccacaaggtgcggccgaaaccaacgactttggaccgggcgacgtgtggtattttcctcgcggtcatgggcacatgctggaatgcctgggcgataaaccggcgcatttcattctgatcttcgataacggctacttctcagagtttggcaccttctctattactgactggatcggtcacacaccgaaagcgcttctcgccaagaactttggtctgcccgaatcggcttttgatgggtttcccaaaaaagaggtctattttgcacgtggcgcggttccaccagccacccctgcagcgcctttacagggactggtattgccaccactcacgcataaatacgaactcctcgaacaagaaccttcgaaagttttcaaaggtggtcgtgaatggcgcgtggatagctcgcgttttcccatttccaagactgtaaccggcgttgttcttgatttggaacccggcgcgttacgcgagcttcactggcatcctaatgctgacgagtggcaatatgtgatcgatggcaacattagtgtgacgatgttcggttctcatggccgttaccgcaccgaacagatggagaagggtgatgtcgggtatattccacaggggtatggccacagcatcgaaaatgtgggagatcgtccttgtcgcgtcttgattggctttaacacaggtaactaccaagcgatcgacttatcacagtggattgcaggtaatcccgcggatgttcttgccacgaacttctccaaacccaccagcctctttgaaaagttcccaaaacaggacgtgtttattgctcctggcaagggccaaactggccaccatcaccatcaccat

SEQ ID NO: 462 - protein, 369 aa, synthetic construct
  REGION 1..369: note = Variant of oxalate decarboxylase from Gemmata sp. SH-PL17
MGDPTFMNNVPDHLLSHKDLPTFKFALEKSKGKVIGKSSGKEATVVQLPISKGIAGVSMTLEPGAMRELHWHATAAEWAFVLTGHVRTTVIDPQGAAETNDFGPGDVWYFPRGHGHMLECLGDKPAHFILIFDNGYFSEFGTFSITDWIGHTPKALLAKNFGLPESAFDGFPKKEVYFARGAVPPATPAAPLQGLVLPPLTHKYELLEQEPSKVFKGGREWRVDSSRFPISKTVTGVVLDLEPGALRELHWHPNADEWQYVIDGNISVTMFGSHGRYRTEQMEKGDVGYIPQGYGHSIENVGDRPCRVLIGFNTGNYQAIDLSQWIAGNPADVLATNFSKPTSLFEKFPKQDVFIAPGKGQTGHHHHHH

SEQ ID NO: 463 - DNA, 1107 bp, synthetic construct
  misc_feature 1..1107: note = Variant of oxalate decarboxylase from Gemmata sp. SH-PL17
  source 1..1107: mol_type = other DNA
atgggtgatccgacctttatgaataatgtgccagaccctctgctgtcgcataaagatttgccgacgttcaagtttgaactggaaaagagcaagggcaaagtcattgggaaaagttcgggaaaagaagcaaccgttgtccagttacctatctccaaaggcattgctggtgtgagcatgactcttgaaccgggtgcgatgcgcgaattgcactggcatgccacagcagcagagtgggctttcgtattaaccggccacgtccgtacgacggtgatcgatccacaaggtgcggccgaaaccaacgactttggaccgggcgacgtgtggtattttcctcgcggtcatgggcacatgctggaatgcctgggcgataaaccggcgcatttcattctgatcttcgataacggctacttctcagagtttggcaccttctctattactgactggatcggtcacacaccgaaagcgcttctcgccaagaactttggtctgcccgaatcggcttttgatgggtttcccaaaaaagaggtctattttgcacgtggcgcggttccaccagccacccctgcagcgcctttacagggactggtattgccaccactcacgcataaatacgaactcctcgaacaagaacctcataaagttttcaaaggtggtcgtgaatggcgcgtggatagcactcgttttcccatttccaagactgtaaccggcgttgttcttgatttggaacccggcgcgttacgcgagcttcactggcatcctaatgctgacgagtggcaatatgtgatcgatggcaacattagtgtgacgatgttcggttctcatggccgttaccgcaccgaacagatggagaagggtgatgtcgggtatattccacaggggtatggccacagcatcgaaaatgtgggagatcgtccttgtcgcgtcttgattggctttaacacaggtaactaccaagcgatcgacttatcacagtggattgcaggtaatcccgtggatgttcttgccacgaacttctccaaacccaccagcctctttgaaaagttcccaaaacaggacgtgtttattgctcctggcaagggccaaactggccaccatcaccatcaccat

SEQ ID NO: 464 - protein, 369 aa, synthetic construct
  REGION 1..369: note = Variant of oxalate decarboxylase from Gemmata sp. SH-PL17
MGDPTFMNNVPDPLLSHKDLPTFKFELEKSKGKVIGKSSGKEATVVQLPISKGIAGVSMTLEPGAMRELHWHATAAEWAFVLTGHVRTTVIDPQGAAETNDFGPGDVWYFPRGHGHMLECLGDKPAHFILIFDNGYFSEFGTFSITDWIGHTPKALLAKNFGLPESAFDGFPKKEVYFARGAVPPATPAAPLQGLVLPPLTHKYELLEQEPHKVFKGGREWRVDSTRFPISKTVTGVVLDLEPGALRELHWHPNADEWQYVIDGNISVTMFGSHGRYRTEQMEKGDVGYIPQGYGHSIENVGDRPCRVLIGFNTGNYQAIDLSQWIAGNPVDVLATNFSKPTSLFEKFPKQDVFIAPGKGQTGHHHHHH

SEQ ID NO: 465 - DNA, 1107 bp, synthetic construct
  misc_feature 1..1107: note = Variant of oxalate decarboxylase from Gemmata sp. SH-PL17
  source 1..1107: mol_type = other DNA
atgggtgatccgacctttatgaataatgtgccagaccatctgctgtcgcataaagatttgccgacgttcaagtttgaactggaaaagagcaagggcaaagtcattgggaaaagttcgggaaaagaagcaaccgttgtccagttacctatctccaaaggcattgctggtgtgagcatgactcttgaaccgggtgcgatgcgcgaattgcactggcatgccacagcagcagagtgggctttcgtattaaccggccacgtccgtacgacggtgatcgatccacaaggtgcggccgaaaccaacgactttggaccgggcgacgtgtggtattttcctcgcggtcatgggcacatgctggaatgcctgggcgataaaccggcgcatttcattctgatcttcgataacggctacttctcagagtttggcaccttctctattactgactggatcggtcacacaccgaaagcgcttctcgccaagaactttggtctgcccgaatcggcttttgatgggtttcccaaaaaagaggtctattttgcacgtggcgcggttccaccagccacccctgcagcgcctttacagggactgaagttgccaccactcacgcataaatacgaactcctcgaacaagaaccttcgaaagttttcaaaggtggtcgtgaatggcgcgtggatagcagtcgttttcccatttccaagactgtaaccggcgttgttcttgatttggaacccggcgcgttacgcgagcttcactggcatcctaatgctgacgagtggcaatatgtgatcgatggcaacattagtgtgacgatgttcggttctcatggccgttaccgcaccgaacagatggagaagggtgatgtcgggtatattccacaggggtatggccacagcatcgaaaatgtgggagatcgtccttgtcgcgtcttgattggctttaacacaggtaactaccaagcgatcgacttatcacagtggattgcaggtaatcccgtggatgttcttgccacgaacttctccaaacccaccagcctctttgaaaagttcccaaaacaggacgtgtttattgctcctggcaagggccaaactggccaccatcaccatcaccat

SEQ ID NO: 466 - protein, 369 aa, synthetic construct
  REGION 1..369: note = Variant of oxalate decarboxylase from Gemmata sp. SH-PL17
MGDPTFMNNVPDHLLSHKDLPTFKFELEKSKGKVIGKSSGKEATVVQLPISKGIAGVSMTLEPGAMRELHWHATAAEWAFVLTGHVRTTVIDPQGAAETNDFGPGDVWYFPRGHGHMLECLGDKPAHFILIFDNGYFSEFGTFSITDWIGHTPKALLAKNFGLPESAFDGFPKKEVYFARGAVPPATPAAPLQGLKLPPLTHKYELLEQEPSKVFKGGREWRVDSSRFPISKTVTGVVLDLEPGALRELHWHPNADEWQYVIDGNISVTMFGSHGRYRTEQMEKGDVGYIPQGYGHSIENVGDRPCRVLIGFNTGNYQAIDLSQWIAGNPVDVLATNFSKPTSLFEKFPKQDVFIAPGKGQTGHHHHHH

SEQ ID NO: 467 - DNA, 1107 bp, synthetic construct
  misc_feature 1..1107: note = Variant of oxalate decarboxylase from Gemmata sp. SH-PL17
  source 1..1107: mol_type = other DNA
atgggtgatccgacctttatgaataatgtgccagaccatctgctgtcgcataaagatttgccgacgttcaagtttgagctggaaaagagcaagggcaaagtcattgggaaaagttcgggaaaagaagcaaccgttgttcagttacctatctccaaaggcattgctggtgtgagcatgactcttgaaccgggtgcgatgcgcgaattgcactggcatgccacagcagcagagtgggctttcgtattaaccggccacgtccgtacgacggtgatcgatccacaaggtgcggccgaaaccaacgactttggaccgggcgacgtgtggtattttcctcgcggtcatgggcacatgctggaatgcctgggcgataaaccggcgcatttcattctgatcttcgataacggctacttctcagagtttggcaccttctctattactgactggatcggtcacacaccgaaagcgcttctcgccaagaactttggtctgcccgaatcggcttttgatgggtttcccaaaaaagaggtctattttgcacgtggcgcggttccaccagccacccctgcagcgcctttacagggactgaagttgccaccactcacgcataaatacgaactcctcgaacaagaaccttcgaaagttttcaaaggtggtcgtgaatggcgcgtggatagcactcgttttcccatttccaagactgtaaccggcgttgttcttgatttggaacccggcgcgttacgcgagcttcactggcatcctaatgctgacgagtggcaatatgtgatcgatggcaacattagtgtgacgatgttcggttctcatggccgttaccgcaccgaacagatggagaagggtgatgtcgggtatattccacaggggtatggccacagcatcgaaaatgtgggagatcgtccttgtcgcgtcttgattggctttaacacaggtaactaccaagcgatcgacttatcacagtggattgcaggtaatcccgtggatgttcttgccacgaacttctccaaacccaccagcctctttgaaaagttcccaaaacaggacgtgtttattgctcctggcaagggccaaactggccaccatcaccatcaccat

SEQ ID NO: 468 - protein, 369 aa, synthetic construct
  REGION 1..369: note = Variant of oxalate decarboxylase from Gemmata sp. SH-PL17
MGDPTFMNNVPDHLLSHKDLPTFKFELEKSKGKVIGKSSGKEATVVQLPISKGIAGVSMTLEPGAMRELHWHATAAEWAFVLTGHVRTTVIDPQGAAETNDFGPGDVWYFPRGHGHMLECLGDKPAHFILIFDNGYFSEFGTFSITDWIGHTPKALLAKNFGLPESAFDGFPKKEVYFARGAVPPATPAAPLQGLKLPPLTHKYELLEQEPSKVFKGGREWRVDSTRFPISKTVTGVVLDLEPGALRELHWHPNADEWQYVIDGNISVTMFGSHGRYRTEQMEKGDVGYIPQGYGHSIENVGDRPCRVLIGFNTGNYQAIDLSQWIAGNPVDVLATNFSKPTSLFEKFPKQDVFIAPGKGQTGHHHHHH

SEQ ID NO: 469 - DNA, 1107 bp, synthetic construct
  misc_feature 1..1107: note = Variant of oxalate decarboxylase from Gemmata sp. SH-PL17
  source 1..1107: mol_type = other DNA
atgggtgatccgacctttatgaataatgtgccagaccctctgctgtcgcataaagatttgccgacgttcaagtttgcgctggaaaagagcaagggcaaagtcattgggaaaagttcgggaaaagaagcaaccgttgtccagttacctatctccaaaggcattgctggtgtgagcatgactcttgaaccgggtgcgatgcgcgaattgcactggcatgccacagcagcagagtgggctttcgtattaaccggccacgtccgtacgacggtgatcgatccacaaggtgcggccgaaaccaacgactttggaccgggcgacgtgtggtattttcctcgcggtcatgggcacatgctggaatgcctgggcgataaaccggcgcatttcattctgatcttcgataacggctacttctcagagtttggcaccttctctattactgactggatcggtcacacaccgaaagcgcttctcgccaagaactttggtctgcccgaatcggcttttgatgggtttcccaaaaaagaggtctattttgcacgtggcgcggttccaccagccacccctgcagcgcctttacagggactggtattgccaccactcacgcataaatacgaactcctcgaacaagaacctcataaagttttcaaaggtggtcgtgaatggcgcgtggatagcactcgttttcccatttccaagactgtaaccggcgttgttcttgatttggaacccggcgcgttacgcgagcttcactggcatcctaatgctgacgagtggcaatatgtgatcgatggcaacattagtgtgacgatgttcggttctcatggccgttaccgcaccgaacagatggagaagggtgatgtcgggtatattccacaggggtatggccacagcatcgaaaatgtgggagatcgtccttgtcgcgtcttgattggctttaacacaggtaactaccaagcgatcgacttatcacagtggattgcaggtaatcccgtggatgttcttgccacgaacttctccaaacccaccagcctctttgaaaagttcccaaaacaggacgtgtttattgctcctggcaagggccaaactggccaccatcaccatcaccat

SEQ ID NO: 470 - protein, 369 aa, synthetic construct
  REGION 1..369: note = Variant of oxalate decarboxylase from Gemmata sp. SH-PL17
MGDPTFMNNVPDPLLSHKDLPTFKFALEKSKGKVIGKSSGKEATVVQLPISKGIAGVSMTLEPGAMRELHWHATAAEWAFVLTGHVRTTVIDPQGAAETNDFGPGDVWYFPRGHGHMLECLGDKPAHFILIFDNGYFSEFGTFSITDWIGHTPKALLAKNFGLPESAFDGFPKKEVYFARGAVPPATPAAPLQGLVLPPLTHKYELLEQEPHKVFKGGREWRVDSTRFPISKTVTGVVLDLEPGALRELHWHPNADEWQYVIDGNISVTMFGSHGRYRTEQMEKGDVGYIPQGYGHSIENVGDRPCRVLIGFNTGNYQAIDLSQWIAGNPVDVLATNFSKPTSLFEKFPKQDVFIAPGKGQTGHHHHHH

SEQ ID NO: 471 - DNA, 1107 bp, synthetic construct
  misc_feature 1..1107: note = Variant of oxalate decarboxylase from Gemmata sp. SH-PL17
  source 1..1107: mol_type = other DNA
atgggtgatccgacctttatgaataatgtgccagaccatctgctgtcggacaaagatttgccgacgttcaagtttgaactggaaaagagcaagggcaaagtcattgggaaaagttcgggaaaagaagcaaccgttcgtcagttacctatctccaaaggcattgctggtgtgagcatggtgcttgaaccgggtgcgatgcgcgaattgcactggcatgccacagcagcagagtgggctttcgtattaaccggccacgtccgtacgacggtgatcgatccacaaggtgcggccgaaaccaacgactttggaccgggcgacgtgtggtattttcctcgcggtcatgggcacatgctggaatgcctgggcgataaaccggcgcatttcattctgatcttcgataacggctacttctcagagtttggcaccttctctattactgactggatcggtcacacaccgaaagcgcttctcgccaagaactttggtctgcccgaatcggcttttgatgggtttcccaaaaaagaggtctattttgcacgtggcgcggttccaccagccacccctgcagcgcctttacagggactgaagttgccaccactcacgcataaatacgaactcctcgaacaagaacctcataaagttttcaaaggtggtcgtgaatggcgcgtggatagcactcgttttcccatttccaagactgtaaccggcgttgttcttgatttggaacccggcgcgttacgcgagcttcactggcatcctaatgctgacgagtggcaatatgtgatcgatggcaacattagtgtgacgatgttcggttctcatggccgttaccgcaccgaacagatggagaagggtgatgtcgggtatattccacaggggtatggccacagcatcgaaaatgtgggagatcgtccttgtcgcgtcttgattggctttaacacaggtaactaccaagcgatcgacttatcacagtggattgcaggtaatcccgtggatgttcttgccacgaacttctccaaacccaccagcctctttgaaaagttcccaaaacaggacgtgtttattgctcctggcaagggccaaactggccaccatcaccatcaccat

SEQ ID NO: 472 - protein, 369 aa, synthetic construct
  REGION 1..369: note = Variant of oxalate decarboxylase from Gemmata sp. SH-PL17
MGDPTFMNNVPDHLLSDKDLPTFKFELEKSKGKVIGKSSGKEATVRQLPISKGIAGVSMVLEPGAMRELHWHATAAEWAFVLTGHVRTTVIDPQGAAETNDFGPGDVWYFPRGHGHMLECLGDKPAHFILIFDNGYFSEFGTFSITDWIGHTPKALLAKNFGLPESAFDGFPKKEVYFARGAVPPATPAAPLQGLKLPPLTHKYELLEQEPHKVFKGGREWRVDSTRFPISKTVTGVVLDLEPGALRELHWHPNADEWQYVIDGNISVTMFGSHGRYRTEQMEKGDVGYIPQGYGHSIENVGDRPCRVLIGFNTGNYQAIDLSQWIAGNPVDVLATNFSKPTSLFEKFPKQDVFIAPGKGQTGHHHHHH

SEQ ID NO: 473 - DNA, 1107 bp, synthetic construct
  misc_feature 1..1107: note = Variant of oxalate decarboxylase from Gemmata sp. SH-PL17
  source 1..1107: mol_type = other DNA
atgggtgatccgacctttatgaataatgtgccagaccatctgctgtcgcataaagatttgccgacgttcaagtttgagctggaaaagagcaagggcaaagtcattgggaaaagttcgggaaaagaagcaaccgttcgtcagttacctatctccaaaggcattgctggtgtgagcatgactcttgaaccgggtgcgatgcgcgaattgcactggcatgccacagcagcagagtgggctttcgtattaaccggccacgtccgtacgacggtgatcgatccacaaggtgcggccgaaaccaacgactttggaccgggcgacgtgtggtattttcctcgcggtcatgggcacatgctggaatgcctgggcgataaaccggcgcatttcattctgatcttcgataacggctacttctcagagtttggcaccttctctattactgactggatcggtcacacaccgaaagcgcttctcgccaagaactttggtctgcccgaatcggcttttgatgggtttcccaaaaaagaggtctattttgcacgtggcgcggttccaccagccacccctgcagcgcctttacagggactgaagttgccaccactcacgcataaatacgaactcctcgaacaagaacctcataaagttttcaaaggtggtcgtgaatggcgcgtggatagctcgcgttttcccatttccaagactgtaaccggcgttgttcttgatttggaacccggcgcgttacgcgagcttcactggcatcctaatgctgacgagtggcaatatgtgatcgatggcaacattagtgtgacgatgttcggttctcatggccgttaccgcaccgaacagatggagaagggtgatgtcgggtatattccacaggggtatggccacagcatcgaaaatgtgggagatcgtccttgtcgcgtcttgattggctttaacacaggtaactaccaagcgatcgacttatcacagtggattgcaggtaatcccgtggatgttcttgccacgaacttctccaaacccaccagcctctttgaaaagttcccaaaacaggacgtgtttattgctcctggcaagggccaaactggccaccatcaccatcaccat

SEQ ID NO: 474 - protein, 369 aa, synthetic construct
  REGION 1..369: note = Variant of oxalate decarboxylase from Gemmata sp. SH-PL17
MGDPTFMNNVPDHLLSHKDLPTFKFELEKSKGKVIGKSSGKEATVRQLPISKGIAGVSMTLEPGAMRELHWHATAAEWAFVLTGHVRTTVIDPQGAAETNDFGPGDVWYFPRGHGHMLECLGDKPAHFILIFDNGYFSEFGTFSITDWIGHTPKALLAKNFGLPESAFDGFPKKEVYFARGAVPPATPAAPLQGLKLPPLTHKYELLEQEPHKVFKGGREWRVDSSRFPISKTVTGVVLDLEPGALRELHWHPNADEWQYVIDGNISVTMFGSHGRYRTEQMEKGDVGYIPQGYGHSIENVGDRPCRVLIGFNTGNYQAIDLSQWIAGNPVDVLATNFSKPTSLFEKFPKQDVFIAPGKGQTGHHHHHH

SEQ ID NO: 475 - DNA, 1107 bp, synthetic construct
  misc_feature 1..1107: note = Variant of oxalate decarboxylase from Gemmata sp. SH-PL17
  source 1..1107: mol_type = other DNA
atgggtgatccgacctttatgaataatgtgccagaccatctgctgtcgcataaagatttgccgacgttcaagtttgaactggaaaagagcaagggcaaagtcattgggaaaagttcgggaaaagaagcaaccgttgttcagttacctatctccaaaggcattgctggtgtgagcatgactcttgaaccgggtgcgatgcgcgaattgcactggcatgccacagcagcagagtgggctttcgtattaaccggccacgtccgtacgacggtgatcgatccacaaggtgcggccgaaaccaacgactttggaccgggcgacgtgtggtattttcctcgcggtcatgggcacatgctggaatgcctgggcgataaaccggcgcatttcattctgatcttcgataacggctacttctcagagtttggcaccttctctattactgactggatcggtcacacaccgaaagcgcttctcgccaagaactttggtctgcccgaatcggcttttgatgggtttcccaaaaaagaggtctattttgcacgtggcgcggttccaccagccacccctgcagcgcctttacagggactggtattgccaccactcacgcataaatacgaactcctcgaacaagaacctgcgaaagttttcaaaggtggtcgtgaatggcgcgtggatagcagtcgttttcccatttccaagactgtaaccggcgttgttcttgatttggaacccggcgcgttacgcgagcttcactggcatcctaatgctgacgagtggcaatatgtgatcgatggcaacattagtgtgacgatgttcggttctcatggccgttaccgcaccgaacagatggagaagggtgatgtcgggtatattccacaggggtatggccacagcatcgaaaatgtgggagatcgtccttgtcgcgtcttgattggctttaacacaggtaactaccaagcgatcgacttatcacagtggattgcaggtaatcccgtggatgttcttgccacgaacttctccaaacccaccagcctctttgaaaagttcccaaaacaggacgtgtttattgctcctggcaagggccaaactggccaccatcaccatcaccat

SEQ ID NO: 476 - protein, 369 aa, synthetic construct
  REGION 1..369: note = Variant of oxalate decarboxylase from Gemmata sp. SH-PL17
MGDPTFMNNVPDHLLSHKDLPTFKFELEKSKGKVIGKSSGKEATVVQLPISKGIAGVSMTLEPGAMRELHWHATAAEWAFVLTGHVRTTVIDPQGAAETNDFGPGDVWYFPRGHGHMLECLGDKPAHFILIFDNGYFSEFGTFSITDWIGHTPKALLAKNFGLPESAFDGFPKKEVYFARGAVPPATPAAPLQGLVLPPLTHKYELLEQEPAKVFKGGREWRVDSSRFPISKTVTGVVLDLEPGALRELHWHPNADEWQYVIDGNISVTMFGSHGRYRTEQMEKGDVGYIPQGYGHSIENVGDRPCRVLIGFNTGNYQAIDLSQWIAGNPVDVLATNFSKPTSLFEKFPKQDVFIAPGKGQTGHHHHHH

SEQ ID NO: 477 - DNA, 1107 bp, synthetic construct
  misc_feature 1..1107: note = Variant of oxalate decarboxylase from Gemmata sp. SH-PL17
  source 1..1107: mol_type = other DNA
atgggtgatccgacctttatgaataatgtgccagaccctctgctgtcgcataaagatttgccgacgttcaagtttgaactggaaaagagcaagggcaaagtcattgggaaaagttcgggaaaagaagcaaccgttcgtcagttacctatctccaaaggcattgctggtgtgagcatgactcttgaaccgggtgcgatgcgcgaattgcactggcatgccacagcagcagagtgggctttcgtattaaccggccacgtccgtacgacggtgatcgatccacaaggtgcggccgaaaccaacgactttggaccgggcgacgtgtggtattttcctcgcggtcatgggcacatgctggaatgcctgggcgataaaccggcgcatttcattctgatcttcgataacggctacttctcagagtttggcaccttctctattactgactggatcggtcacacaccgaaagcgcttctcgccaagaactttggtctgcccgaatcggcttttgatgggtttcccaaaaaagaggtctattttgcacgtggcgcggttccaccagccacccctgcagcgcctttacagggactgaagttgccaccactcacgcataaatacgaactcctcgaacaagaacctcataaagttttcaaaggtggtcgtgaatggcgcgtggatagcagtcgttttcccatttccaagactgtaaccggcgttgttcttgatttggaacccggcgcgttacgcgagcttcactggcatcctaatgctgacgagtggcaatatgtgatcgatggcaacattagtgtgacgatgttcggttctcatggccgttaccgcaccgaacagatggagaagggtgatgtcgggtatattccacaggggtatggccacagcatcgaaaatgtgggagatcgtccttgtcgcgtcttgattggctttaacacaggtaactaccaagcgatcgacttatcacagtggattgcaggtaatcccgcggatgttcttgccacgaacttctccaaacccaccagcctctttgaaaagttcccaaaacaggacgtgtttattgctcctggcaagggccaaactggccaccatcaccatcaccat

SEQ ID NO: 478 - protein, 369 aa, synthetic construct
  REGION 1..369: note = Variant of oxalate decarboxylase from Gemmata sp. SH-PL17
MGDPTFMNNVPDPLLSHKDLPTFKFELEKSKGKVIGKSSGKEATVRQLPISKGIAGVSMTLEPGAMRELHWHATAAEWAFVLTGHVRTTVIDPQGAAETNDFGPGDVWYFPRGHGHMLECLGDKPAHFILIFDNGYFSEFGTFSITDWIGHTPKALLAKNFGLPESAFDGFPKKEVYFARGAVPPATPAAPLQGLKLPPLTHKYELLEQEPHKVFKGGREWRVDSSRFPISKTVTGVVLDLEPGALRELHWHPNADEWQYVIDGNISVTMFGSHGRYRTEQMEKGDVGYIPQGYGHSIENVGDRPCRVLIGFNTGNYQAIDLSQWIAGNPADVLATNFSKPTSLFEKFPKQDVFIAPGKGQTGHHHHHH

SEQ ID NO: 479 - DNA, 1107 bp, synthetic construct
  misc_feature 1..1107: note = Variant of oxalate decarboxylase from Gemmata sp. SH-PL17
  source 1..1107: mol_type = other DNA
atgggtgatccgacctttatgaataatgtgccagaccatctgctgtcggacaaagatttgccgacgttcaagtttgagctggaaaagagcaagggcaaagtcattgggaaaagttcgggaaaagaagcaaccgttgtccagttacctatctccaaaggcattgctggtgtgagcatgactcttgaaccgggtgcgatgcgcgaattgcactggcatgccacagcagcagagtgggctttcgtattaaccggccacgtccgtacgacggtgatcgatccacaaggtgcggccgaaaccaacgactttggaccgggcgacgtgtggtattttcctcgcggtcatgggcacatgctggaatgcctgggcgataaaccggcgcatttcattctgatcttcgataacggctacttctcagagtttggcaccttctctattactgactggatcggtcacacaccgaaagcgcttctcgccaagaactttggtctgcccgaatcggcttttgatgggtttcccaaaaaagaggtctattttgcacgtggcgcggttccaccagccacccctgcagcgcctttacagggactgaagttgccaccactcacgcataaatacgaactcctcgaacaagaaccttcgaaagttttcaaaggtggtcgtgaatggcgcgtggatagctcgcgttttcccatttccaagactgtaaccggcgttgttcttgatttggaacccggcgcgttacgcgagcttcactggcatcctaatgctgacgagtggcaatatgtgatcgatggcaacattagtgtgacgatgttcggttctcatggccgttaccgcaccgaacagatggagaagggtgatgtcgggtatattccacaggggtatggccacagcatcgaaaatgtgggagatcgtccttgtcgcgtcttgattggctttaacacaggtaactaccaagcgatcgacttatcacagtggattgcaggtaatcccgcggatgttcttgccacgaacttctccaaacccaccagcctctttgaaaagttcccaaaacaggacgtgtttattgctcctggcaagggccaaactggccaccatcaccatcaccat

SEQ ID NO: 480 - protein, 369 aa, synthetic construct
  REGION 1..369: note = Variant of oxalate decarboxylase from Gemmata sp. SH-PL17
MGDPTFMNNVPDHLLSDKDLPTFKFELEKSKGKVIGKSSGKEATVVQLPISKGIAGVSMTLEPGAMRELHWHATAAEWAFVLTGHVRTTVIDPQGAAETNDFGPGDVWYFPRGHGHMLECLGDKPAHFILIFDNGYFSEFGTFSITDWIGHTPKALLAKNFGLPESAFDGFPKKEVYFARGAVPPATPAAPLQGLKLPPLTHKYELLEQEPSKVFKGGREWRVDSSRFPISKTVTGVVLDLEPGALRELHWHPNADEWQYVIDGNISVTMFGSHGRYRTEQMEKGDVGYIPQGYGHSIENVGDRPCRVLIGFNTGNYQAIDLSQWIAGNPADVLATNFSKPTSLFEKFPKQDVFIAPGKGQTGHHHHHH

SEQ ID NO: 481 - DNA, 1107 bp, synthetic construct
  misc_feature 1..1107: note = Variant of oxalate decarboxylase from Gemmata sp. SH-PL17
  source 1..1107: mol_type = other DNA
atgggtgatccgacctttatgaataatgtgccagaccctctgctgtcgcataaagatttgccgacgttcaagtttgcgctggaaaagagcaagggcaaagtcattgggaaaagttcgggaaaagaagcaaccgttgttcagttacctatctccaaaggcattgctggtgtgagcatgactcttgaaccgggtgcgatgcgcgaattgcactggcatgccacagcagcagagtgggctttcgtattaaccggccacgtccgtacgacggtgatcgatccacaaggtgcggccgaaaccaacgactttggaccgggcgacgtgtggtattttcctcgcggtcatgggcacatgctggaatgcctgggcgataaaccggcgcatttcattctgatcttcgataacggctacttctcagagtttggcaccttctctattactgactggatcggtcacacaccgaaagcgcttctcgccaagaactttggtctgcccgaatcggcttttgatgggtttcccaaaaaagaggtctattttgcacgtggcgcggttccaccagccacccctgcagcgcctttacagggactggtattgccaccactcacgcataaatacgaactcctcgaacaagaacctcataaagttttcaaaggtggtcgtgaatggcgcgtggatagctcgcgttttcccatttccaagactgtaaccggcgttgttcttgatttggaacccggcgcgttacgcgagcttcactggcatcctaatgctgacgagtggcaatatgtgatcgatggcaacattagtgtgacgatgttcggttctcatggccgttaccgcaccgaacagatggagaagggtgatgtcgggtatattccacaggggtatggccacagcatcgaaaatgtgggagatcgtccttgtcgcgtcttgattggctttaacacaggtaactaccaagcgatcgacttatcacagtggattgcaggtaatcccgcggatgttcttgccacgaacttctccaaacccaccagcctctttgaaaagttcccaaaacaggacgtgtttattgctcctggcaagggccaaactggccaccatcaccatcaccat

SEQ ID NO: 482 - protein, 369 aa, synthetic construct
  REGION 1..369: note = Variant of oxalate decarboxylase from Gemmata sp. SH-PL17
MGDPTFMNNVPDPLLSHKDLPTFKFALEKSKGKVIGKSSGKEATVVQLPISKGIAGVSMTLEPGAMRELHWHATAAEWAFVLTGHVRTTVIDPQGAAETNDFGPGDVWYFPRGHGHMLECLGDKPAHFILIFDNGYFSEFGTFSITDWIGHTPKALLAKNFGLPESAFDGFPKKEVYFARGAVPPATPAAPLQGLVLPPLTHKYELLEQEPHKVFKGGREWRVDSSRFPISKTVTGVVLDLEPGALRELHWHPNADEWQYVIDGNISVTMFGSHGRYRTEQMEKGDVGYIPQGYGHSIENVGDRPCRVLIGFNTGNYQAIDLSQWIAGNPADVLATNFSKPTSLFEKFPKQDVFIAPGKGQTGHHHHHH

SEQ ID NO: 483 - DNA, 1107 bp, synthetic construct
  misc_feature 1..1107: note = Variant of oxalate decarboxylase from Gemmata sp. SH-PL17
  source 1..1107: mol_type = other DNA
atgggtgatccgacctttatgaataatgtgccagaccatctgctgtcgggtaaagatttgccgacgttcaagtttgaactggaaaagagcaagggcaaagtcattgggaaaagttcgggaaaagaagcaaccgttgttcagttacctatctccaaaggcattgctggtgtgagcatgactcttgaaccgggtgcgatgcgcgaattgcactggcatgccacagcagcagagtgggctttcgtattagagggccacgtccgtacgacggtgatcgatccacaaggtgcggccgaaaccaacgactttggaccgggcgacgtgtggtattttcctcgcggtcatgggcacatgctggaatgcctgggcgataaaccggcgcatttcattctgatcttcgataacggctacttctcagagtttggcaccttctctattactgactggatcggtcacacaccgaaagcgcttctcgccaagaactttggtctgcccgaatcggcttttgatgggtttcccaagaaagaggtctattttgcacgtggcgcggttccaccagccacccctgcagcgcctttacagggactggtattgccaccactcacgcataaatacgaactcctcgaacaagaacctcataaagttttcaaaggtggtcgtgaatggcgcgtggatagctcgcgttttcccatttccaagactgtaaccggcgttgttcttgatttggaacccggcgcgttacgcgagcttcactggcatcctaatgctgacgagtggcaatatgtgatctcgggcaacattagtgtgacgatgttcggttctcatggccgttaccgcaccgaacagatggagaagggtgatgtcgggtatattccacaggggtatggccacagcatcgaaaatgtgggagatcgtccatgtcgcgtcttgattggctttaacacaggtaactaccaagcgatcgacttatcacagtggattgcaggtaatcccgcggatgttcttgccacgaacttctccaaacccaccagcctctttgaaaagttcccaaaacaggacgtgtttattgctcctggcaagggccaaactggccaccatcaccatcaccat

SEQ ID NO: 484 - protein, 369 aa, synthetic construct
  REGION 1..369: note = Variant of oxalate decarboxylase from Gemmata sp. SH-PL17
MGDPTFMNNVPDHLLSGKDLPTFKFELEKSKGKVIGKSSGKEATVVQLPISKGIAGVSMTLEPGAMRELHWHATAAEWAFVLEGHVRTTVIDPQGAAETNDFGPGDVWYFPRGHGHMLECLGDKPAHFILIFDNGYFSEFGTFSITDWIGHTPKALLAKNFGLPESAFDGFPKKEVYFARGAVPPATPAAPLQGLVLPPLTHKYELLEQEPHKVFKGGREWRVDSSRFPISKTVTGVVLDLEPGALRELHWHPNADEWQYVISGNISVTMFGSHGRYRTEQMEKGDVGYIPQGYGHSIENVGDRPCRVLIGFNTGNYQAIDLSQWIAGNPADVLATNFSKPTSLFEKFPKQDVFIAPGKGQTGHHHHHH

SEQ ID NO: 485 - DNA, 1107 bp, synthetic construct
  misc_feature 1..1107: note = Variant of oxalate decarboxylase from Gemmata sp. SH-PL17
  source 1..1107: mol_type = other DNA
atgggtgatccgacctttatgaataatgtgccagaccatctgctgtcgggtaaagatttgccgacgttcaagtttgaactggaaaagagcaagggcaaagtcattgggaaaagttcgggaaaagaagcaaccgttgttcagttacctatctccaaaggcattgctggtgtgagcatgactcttgaaccgggtgcgatgcgcgaattgcactggcatgccacagcagcagagtgggctttcgtattagagggccacgtccgtacgacggtgatcgatccacaaggtgcggccgaaaccaacgactttgggccgggcgacgtgtggtattttcctcgcggtcatgggcacatgctggaatgcctgggcgataaaccggcgcatttcattctgatcttcgataacggctacttctcagagtttggcaccttctctattactgactggatcggtcacacaccgaaagcgcttctcgccaagaactttggtctgcccgaatcggcttttgatgggtttccccagaaagaggtctattttgcacgtggcgcggttccaccagccacccctgcagcgcctttacagggactggtattgccaccactcacgcataaatacgaactcctcgaacaagaacctcataaagttttcaaaggtggtcgtgaatggcgcgtggatagctcggaatttcccatttccaagactgtaaccggcgttgttcttgatttggaacccggcgcgttacgcgagcttcactggcatcctaatgctgacgagtggcaatatgtgatcgatggcaacattagtgtgacgatgttcggttctcatggccgttaccgcaccgaacagatggagaagggtgatgtcgggtatattccacaggggtatggccacagcatcgaaaatgtgggagatcgtccatgtcgcgtcttgattggctttaacacaggtaactaccaagcgatcgacttatcacagtggattgcaggtaatcccgcggatgttcttgccacgaacttctccaaacccaccagcctctttgaaaagttcccaaaacaggacgtgtttattgctcctggcaagggccaaactggccaccatcaccatcaccat

SEQ ID NO: 486 - protein, 369 aa, synthetic construct
  REGION 1..369: note = Variant of oxalate decarboxylase from Gemmata sp. SH-PL17
MGDPTFMNNVPDHLLSGKDLPTFKFELEKSKGKVIGKSSGKEATVVQLPISKGIAGVSMTLEPGAMRELHWHATAAEWAFVLEGHVRTTVIDPQGAAETNDFGPGDVWYFPRGHGHMLECLGDKPAHFILIFDNGYFSEFGTFSITDWIGHTPKALLAKNFGLPESAFDGFPQKEVYFARGAVPPATPAAPLQGLVLPPLTHKYELLEQEPHKVFKGGREWRVDSSEFPISKTVTGVVLDLEPGALRELHWHPNADEWQYVIDGNISVTMFGSHGRYRTEQMEKGDVGYIPQGYGHSIENVGDRPCRVLIGFNTGNYQAIDLSQWIAGNPADVLATNFSKPTSLFEKFPKQDVFIAPGKGQTGHHHHHH

SEQ ID NO: 487 - DNA, 1107 bp, synthetic construct
  misc_feature 1..1107: note = Variant of oxalate decarboxylase from Gemmata sp. SH-PL17
  source 1..1107: mol_type = other DNA
atgggtgatccgacctttatgaataatgtgccagaccatctgctgtcgggtaaagatttgccgacgttcaagtttgaactggaaaagagcaagggcaaagtcattgggaaaagttcgggaaaagaagcaaccgttgttcagttacctatctccaaaggcattgctggtgtgagcatgactcttgaaccgggtgcgatgcgcgaattgcactggcatgccacagcagcagagtgggctttcgtattaaccggccacgtccgtacgacggtgatcgatccacaaggtgcggccgaaaccaacgactttgggccgggcgacgtgtggtattttcctcgcggtcatgggcacatgctggaatgcctgggcgataaaccggcgcatttcattctgatcttcgataacggctacttctcagagtttggcaccttctctattactgactggatcggtcacacaccgaaagcgcttctcgccaagaactttggtctgcccgaatcggcttttgatgggtttcccaagaaagaggtctattttgcacgtggcgcggttccaccagccacccctgcagcgcctttacagggactggtattgccaccactcacgcataaatacgaactcctcgaacaagaacctcataaagttttcaaaggtggtcgtgaatggcgcgtggatagctcggaatttcccatttccaagactgtaaccggcgttgttcttgatttggaacccggcgcgttacgcgagcttcactggcatcctaatgctgacgagtggcaatatgtgatcgatggcaacattagtgtgacgatgttcggttctcatggccgttaccgcaccgaacagatggagaagggtgatgtcgggtatattccacaggggtatggccacagcatcgaaaatattggagatcgtccatgtcgcgtcttgattggctttaacacaggtaactaccaagcgatcgacttatcacagtggattgcaggtaatcccgcggatgttcttgccacgaacttctccaaacccaccagcctctttgaaaagttcccaaaacaggacgtgtttattgctcctggcaagggccaaactggccaccatcaccatcaccat

SEQ ID NO: 488 - protein, 369 aa, synthetic construct
  REGION 1..369: note = Variant of oxalate decarboxylase from Gemmata sp. SH-PL17
MGDPTFMNNVPDHLLSGKDLPTFKFELEKSKGKVIGKSSGKEATVVQLPISKGIAGVSMTLEPGAMRELHWHATAAEWAFVLTGHVRTTVIDPQGAAETNDFGPGDVWYFPRGHGHMLECLGDKPAHFILIFDNGYFSEFGTFSITDWIGHTPKALLAKNFGLPESAFDGFPKKEVYFARGAVPPATPAAPLQGLVLPPLTHKYELLEQEPHKVFKGGREWRVDSSEFPISKTVTGVVLDLEPGALRELHWHPNADEWQYVIDGNISVTMFGSHGRYRTEQMEKGDVGYIPQGYGHSIENIGDRPCRVLIGFNTGNYQAIDLSQWIAGNPADVLATNFSKPTSLFEKFPKQDVFIAPGKGQTGHHHHHH

SEQ ID NO: 489 - DNA, 1107 bp, synthetic construct
  misc_feature 1..1107: note = Variant of oxalate decarboxylase from Gemmata sp. SH-PL17
  source 1..1107: mol_type = other DNA
atgggtgatccgacctttatgaataatgtgccagaccatctgctgtcgggtaaagatttgccgacgttcaagtttgaactggaaaagagcaagggcaaagtcattgggaaaagttcgggaaaagaagcaaccgttgttcagttacctatctccaaaggcattgctggtgtgagcatgactcttgaaccgggtgcgatgcgcgaattgcactggcatgccacagcagcagagtgggctttcgtattagagggccacgtccgtacgacggtgatcgatccacaaggtgcggccgaaaccaacgactttgggccgggcgacgtgtggtattttcctcgcggtcatgggcacatgctggaatgcctgggcgataaaccggcgcatttcattctgatcttcgataacggctacttctcagagtttggcaccttctctattactgactggatcggtcacacaccgaaagcgcttctcgccaagaactttggtctgcccgaatcggcttttgatgggtttcccaaaaaagaggtctattttgcacgtggcgcggttccaccagccacccctgcagcgcctttacagggactggtattgccaccactcacgcataaatacgaactcctcgaacaagaacctcataaagttttcaaaggtggtcgtgaatggcgcgtggatagctcggaatttcccatttccaagactgtaaccggcgttgttcttgatttggaacccggcgcgttacgcgagcttcactggcatcctaatgctgacgagtggcaatatgtgatctcgggcaacattagtgtgacgatgttcggttctcatggccgttaccgcaccgaacagatggagaagggtgatgtcgggtatattccacaggggtatggccacagcatcgaaaatgtgggagatcgtccatgtcgcgtcttgattggctttaacacaggtaactaccaagcgatcgacttatcacagtggattgcaggtaatcccgcggatgttcttgccacgaacttctccaaacccaccagcctctttgaaaagttcccaaaacaggacgtgtttattgctcctggcaagggccaaactggccaccatcaccatcaccat

SEQ ID NO: 490 - protein, 369 aa, synthetic construct
  REGION 1..369: note = Variant of oxalate decarboxylase from Gemmata sp. SH-PL17
MGDPTFMNNVPDHLLSGKDLPTFKFELEKSKGKVIGKSSGKEATVVQLPISKGIAGVSMTLEPGAMRELHWHATAAEWAFVLEGHVRTTVIDPQGAAETNDFGPGDVWYFPRGHGHMLECLGDKPAHFILIFDNGYFSEFGTFSITDWIGHTPKALLAKNFGLPESAFDGFPKKEVYFARGAVPPATPAAPLQGLVLPPLTHKYELLEQEPHKVFKGGREWRVDSSEFPISKTVTGVVLDLEPGALRELHWHPNADEWQYVISGNISVTMFGSHGRYRTEQMEKGDVGYIPQGYGHSIENVGDRPCRVLIGFNTGNYQAIDLSQWIAGNPADVLATNFSKPTSLFEKFPKQDVFIAPGKGQTGHHHHHH

SEQ ID NO: 491 - DNA, 1107 bp, synthetic construct
  misc_feature 1..1107: note = Variant of oxalate decarboxylase from Gemmata sp. SH-PL17
  source 1..1107: mol_type = other DNA
atgggtgatccgacctttatgaataatgtgccagaccatctgctgtcgggtaaagatttgccgacgttcaagtttgaactggaaaagagcaagggcaaagtcattgggaaaagttcgggaaaagaagcaaccgttgttcagttacctatctccaaaggcattgctggtgtgagcatgactcttgaaccgggtgcgatgcgcgaattgcactggcatgccacagcagcagagtgggctttcgtattagagggccacgtccgtacgacggtgatcgatccacaaggtgcggccgaaaccaacgactttggaccgggcgacgtgtggtattttcctcgcggtcatgggcacatgctggaatgcctgggcgataaagaggcgcatttcattctgatcttcgataacggctacttctcagagtttggcaccttctctattactgactggatcggtcacacaccgaaagcgcttctcgccaagaactttggtctgcccgaatcggcttttgatgggtttcccaaaaaagaggtctattttgcacgtggcgcggttccaccagccacccctgcagcgcctttacagggactggtattgccaccactcacgcataaatacgaactcctcgaacaagaacctcataaagttttcaaaggtggtcgtgaatggcgcgtggatagctcgcgttttcccatttccaagactgtaaccggcgttgttcttgatttggaacccggcgcgttacgcgagcttcactggcatcctaatgctgacgagtggcaatatgtgatcgatggcaacattagtgtgacgatgttcggttctcatggccgttaccgcaccgaacagatggagaagggtgatgtcgggtatattccacaggggtatggccacagcatcgaaaatgtgggagatcgtccatgtcgcgtcttgattggctttaacacaggtaactaccaagcgatcgacttatcacagtggattgcaggtaatcccgcggatgttcttgccacgaacttctccaaacccaccagcctctttgaaaagttcccaaaacaggacgtgtttattgctcctggcaagggccaaactggccaccatcaccatcaccat

SEQ ID NO: 492 - protein, 369 aa, synthetic construct
  REGION 1..369: note = Variant of oxalate decarboxylase from Gemmata sp. SH-PL17
MGDPTFMNNVPDHLLSGKDLPTFKFELEKSKGKVIGKSSGKEATVVQLPISKGIAGVSMTLEPGAMRELHWHATAAEWAFVLEGHVRTTVIDPQGAAETNDFGPGDVWYFPRGHGHMLECLGDKEAHFILIFDNGYFSEFGTFSITDWIGHTPKALLAKNFGLPESAFDGFPKKEVYFARGAVPPATPAAPLQGLVLPPLTHKYELLEQEPHKVFKGGREWRVDSSRFPISKTVTGVVLDLEPGALRELHWHPNADEWQYVIDGNISVTMFGSHGRYRTEQMEKGDVGYIPQGYGHSIENVGDRPCRVLIGFNTGNYQAIDLSQWIAGNPADVLATNFSKPTSLFEKFPKQDVFIAPGKGQTGHHHHHH

SEQ ID NO: 493 - DNA, 1107 bp, synthetic construct
  misc_feature 1..1107: note = Variant of oxalate decarboxylase from Gemmata sp. SH-PL17
  source 1..1107: mol_type = other DNA
atgggtgatccgacctttatgaataatgtgccagaccatctgctgtcgggtaaagatttgccgacgttcaagtttgaactggaaaagagcaagggcaaagtcattgggaaaagttcgggaaaagaagcaaccgttgttcagttacctatctccaaaggcattgctggtgtgagcatgactcttgaaccgggtgcgatgcgcgaattgcactggcatgccacagcagcagagtgggctttcgtattagagggccacgtccgtacgacggtgatcgatccacaaggtgcggccgaaaccaacgactttggaccgggcgacgtgtggtattttcctcgcggtcatgggcacatgctggaatgcctgggcgataaaccagcgcatttcattctgatcttcgataacggctacttctcagagtttggcaccttctctattactgactggatcggtcacacaccgaaagcgcttctcgccaagaactttggtctgcccgaatcggcttttgatgggtttccccagaaagaggtctattttgcacgtggcgcggttccaccagccacccctgcagcgcctttacagggactggtattgccaccactcacgcataaatacgaactcctcgaacaagaacctcataaagttttcaaaggtggtcgtgaatggcgcgtggatagctcgcgttttcccatttccaagactgtaaccggcgttgttcttgatttggaacccggcgcgttacgcgagcttcactggcatcctaatgctgacgagtggcaatatgtgatcgatggcaacattagtgtgacgatgttcggttctcatggccgttaccgcaccgaacagatggagaagggtgatgtcgggtatattccacaggggtatggccacagcatcgaaaatgtgggagatcgtccatgtcgcgtcttgattggctttaacacaggtaactaccaagcgatcgacttatcacagtggattgcaggtaatcccgcggatgttcttgccacgaacttctccaaacccaccagcctctttgaaaagttcccaaaacaggacgtgtttattgctcctggcaagggccaaactggccaccatcaccatcaccat

SEQ ID NO: 494 - protein, 369 aa, synthetic construct
  REGION 1..369: note = Variant of oxalate decarboxylase from Gemmata sp. SH-PL17
MGDPTFMNNVPDHLLSGKDLPTFKFELEKSKGKVIGKSSGKEATVVQLPISKGIAGVSMTLEPGAMRELHWHATAAEWAFVLEGHVRTTVIDPQGAAETNDFGPGDVWYFPRGHGHMLECLGDKPAHFILIFDNGYFSEFGTFSITDWIGHTPKALLAKNFGLPESAFDGFPQKEVYFARGAVPPATPAAPLQGLVLPPLTHKYELLEQEPHKVFKGGREWRVDSSRFPISKTVTGVVLDLEPGALRELHWHPNADEWQYVIDGNISVTMFGSHGRYRTEQMEKGDVGYIPQGYGHSIENVGDRPCRVLIGFNTGNYQAIDLSQWIAGNPADVLATNFSKPTSLFEKFPKQDVFIAPGKGQTGHHHHHH

SEQ ID NO: 495 - DNA, 1107 bp, synthetic construct
  misc_feature 1..1107: note = Variant of oxalate decarboxylase from Gemmata sp. SH-PL17
  source 1..1107: mol_type = other DNA
atgggtgatccgacctttatgaataatgtgccagaccatctgctgtcgggtaaagatttgccgacgttcaagtttgaactggaaaagagcaagggcaaagtcattgggaaaagttcgggaaaagaagcaaccgttgttcagttacctatctccaaaggcattgctggtgtgagcatgactcttgaaccgggtgcgatgcgcgaattgcactggcatgccacagcagcagagtgggctttcgtattaaccggccacgtccgtacgacggtgatcgatccacaaggtgcggccgaaaccaacgactttggaccgggcgacgtgtggtattttcctcgcggtcatgggcacatgctggaatgcctgggcgataaaccggcgcatttcattctgatcttcgataacggctacttctcagagtttggcaccttctctattactgactggatcggtcacacaccgaaagcgcttctcgccaagaactttggtctgcccgaatcggcttttgatgggtttcccaagaaagaggtctattttgcacgtggcgcggttccaccagccacccctgcagcgcctttacagggactggtattgccaccactcacgcataaatacgaactcctcgaacaagaacctcataaagttttcaaaggtggtcgtgaatggcgcgtggatagctcgcgttttcccatttccaagactgtaaccggcgttgttcttgatttggaacccggcgcgttacgcgagcttcactggcatcctaatgctgacgagtggcaatatgtgatctcgggcaacattagtgtgacgatgttcggttctcatggccgttaccgcaccgaacagatggagaagggtgatgtcgggtatattccacaggggtatggccacagcatcgaaaatattggagatcgtccatgtcgcgtcttgattggctttaacacaggtaactaccaagcgatcgacttatcacagtggattgcaggtaatcccgcggatgttcttgccacgaacttctccaaacccaccagcctctttgaaaagttcccaaaacaggacgtgtttattgctcctggcaagggccaaactggccaccatcaccatcaccat

SEQ ID NO: 496 - protein, 369 aa, synthetic construct
  REGION 1..369: note = Variant of oxalate decarboxylase from Gemmata sp. SH-PL17
MGDPTFMNNVPDHLLSGKDLPTFKFELEKSKGKVIGKSSGKEATVVQLPISKGIAGVSMTLEPGAMRELHWHATAAEWAFVLTGHVRTTVIDPQGAAETNDFGPGDVWYFPRGHGHMLECLGDKPAHFILIFDNGYFSEFGTFSITDWIGHTPKALLAKNFGLPESAFDGFPKKEVYFARGAVPPATPAAPLQGLVLPPLTHKYELLEQEPHKVFKGGREWRVDSSRFPISKTVTGVVLDLEPGALRELHWHPNADEWQYVISGNISVTMFGSHGRYRTEQMEKGDVGYIPQGYGHSIENIGDRPCRVLIGFNTGNYQAIDLSQWIAGNPADVLATNFSKPTSLFEKFPKQDVFIAPGKGQTGHHHHHH

SEQ ID NO: 497 - DNA, 1107 bp, synthetic construct
  misc_feature 1..1107: note = Variant of oxalate decarboxylase from Gemmata sp. SH-PL17
  source 1..1107: mol_type = other DNA
atgggtgatccgacctttatgaataatgtgccagaccatctgctgtcgggtaaagatttgccgacgttcaagtttgaactggaaaagagcaagggcaaagtcattgggaaaagttcgggaaaagaagcaaccgttgttcagttacctatctccaaaggcattgctggtgtgagcatgactcttgaaccgggtgcgatgcgcgaattgcactggcatgccacagcagcagagtgggctttcgtattaaccggccacgtccgtacgacggtgatcgatccacaaggtgcggccgaaaccaacgactttggaccgggcgacgtgtggtattttcctcgcggtcatgggcacatgctggaatgcctgggcgataaagaggcgcatttcattctgatcttcgataacggctacttctcagagtttggcaccttctctattactgactggatcggtcacacaccgaaagcgcttctcgccaagaactttggtctgcccgaatcggcttttgatgggtttcccaaaaaagaggtctattttgcacgtggcgcggttccaccagccacccctgcagcgcctttacagggactggtattgccaccactcacgcataaatacgaactcctcgaacaagaacctcataaagttttcaaaggtggtcgtgaatggcgcgtggatagctcgcgttttcccatttccaagactgtaaccggcgttgttcttgatttggaacccggcgcgttacgcgagcttcactggcatcctaatgctgacgagtggcaatatgtgatcgatggcaacattagtgtgacgatgttcggttctcatggccgttaccgcaccgaacagatggagaagggtgatgtcgggtatattccacaggggtatggccacagcatcgaaaatgtgggagatcgtccatgtcgcgtcttgattggctttaacacaggtaactaccaagcgatcgacttatcacagtggattgcaggtaatcccgcggatgttcttgccacgaacttctccaaacccaccagcctctttgaaaagttcccaaaacaggacgtgtttattgctcctggcaagggccaaactggccaccatcaccatcaccat

SEQ ID NO: 498 - protein, 369 aa, synthetic construct
  REGION 1..369: note = Variant of oxalate decarboxylase from Gemmata sp. SH-PL17
MGDPTFMNNVPDHLLSGKDLPTFKFELEKSKGKVIGKSSGKEATVVQLPISKGIAGVSMTLEPGAMRELHWHATAAEWAFVLTGHVRTTVIDPQGAAETNDFGPGDVWYFPRGHGHMLECLGDKEAHFILIFDNGYFSEFGTFSITDWIGHTPKALLAKNFGLPESAFDGFPKKEVYFARGAVPPATPAAPLQGLVLPPLTHKYELLEQEPHKVFKGGREWRVDSSRFPISKTVTGVVLDLEPGALRELHWHPNADEWQYVIDGNISVTMFGSHGRYRTEQMEKGDVGYIPQGYGHSIENVGDRPCRVLIGFNTGNYQAIDLSQWIAGNPADVLATNFSKPTSLFEKFPKQDVFIAPGKGQTGHHHHHH

SEQ ID NO: 499 - DNA, 1107 bp, synthetic construct
  misc_feature 1..1107: note = Variant of oxalate decarboxylase from Gemmata sp. SH-PL17
  source 1..1107: mol_type = other DNA
atgggtgatccgacctttatgaataatgtgccagaccatctgctgtcgggtaaagatttgccgacgttcaagtttgaactggaaaagagcaagggcaaagtcattgggaaaagttcgggaaaagaagcaaccgttgttcagttacctatctccaaaggcattgctggtgtgagcatgactcttgaaccgggtgcgatgcgcgaattgcactggcatgccacagcagcagagtgggctttcgtattagagggccacgtccgtacgacggtgatcgatccacaaggtgcggccgaaaccaacgactttgggccgggcgacgtgtggtattttcctcgcggtcatgggcacatgctggaatgcctgggcgataaaccagcgcatttcattctgatcttcgataacggctacttctcagagtttggcaccttctctattactgactggatcggtcacacaccgaaagcgcttctcgccaagaactttggtctgcccgaatcggcttttgatgggtttcccaagaaagaggtctattttgcacgtggcgcggttccaccagccacccctgcagcgcctttacagggactggtattgccaccactcacgcataaatacgaactcctcgaacaagaacctcataaagttttcaaaggtggtcgtgaatggcgcgtggatagctcgcgttttcccatttccaagactgtaaccggcgttgttcttgatttggaacccggcgcgttacgcgagcttcactggcatcctaatgctgacgagtggcaatatgtgatcgatggcaacattagtgtgacgatgttcggttctcatggccgttaccgcaccgaacagatggagaagggtgatgtcgggtatattccacaggggtatggccacagcatcgaaaatattggagatcgtccatgtcgcgtcttgattggctttaacacaggtaactaccaagcgatcgacttatcacagtggattgcaggtaatcccgcggatgttcttgccacgaacttctccaaacccaccagcctctttgaaaagttcccaaaacaggacgtgtttattgctcctggcaagggccaaactggccaccatcaccatcaccat

SEQ ID NO: 500 - protein, 369 aa, synthetic construct
  REGION 1..369: note = Variant of oxalate decarboxylase from Gemmata sp. SH-PL17
MGDPTFMNNVPDHLLSGKDLPTFKFELEKSKGKVIGKSSGKEATVVQLPISKGIAGVSMTLEPGAMRELHWHATAAEWAFVLEGHVRTTVIDPQGAAETNDFGPGDVWYFPRGHGHMLECLGDKPAHFILIFDNGYFSEFGTFSITDWIGHTPKALLAKNFGLPESAFDGFPKKEVYFARGAVPPATPAAPLQGLVLPPLTHKYELLEQEPHKVFKGGREWRVDSSRFPISKTVTGVVLDLEPGALRELHWHPNADEWQYVIDGNISVTMFGSHGRYRTEQMEKGDVGYIPQGYGHSIENIGDRPCRVLIGFNTGNYQAIDLSQWIAGNPADVLATNFSKPTSLFEKFPKQDVFIAPGKGQTGHHHHHH

SEQ ID NO: 501 - DNA, 1107 bp, synthetic construct
  misc_feature 1..1107: note = Variant of oxalate decarboxylase from Gemmata sp. SH-PL17
  source 1..1107: mol_type = other DNA
atgggtgatccgacctttatgaataatgtgccagaccatctgctgtcgggtaaagatttgccgacgttcaagtttgaactggaaaagagcaagggcaaagtcattgggaaaagttcgggaaaagaagcaaccgttgttcagttacctatctccaaaggcattgctggtgtgagcatgactcttgaaccgggtgcgatgcgcgaattgcactggcatgccacagcagcagagtgggctttcgtattaaccggccacgtccgtacgacggtgatcgatccacaaggtgcggccgaaaccaacgactttgggccgggcgacgtgtggtattttcctcgcggtcatgggcacatgctggaatgcctgggcgataaaccggcgcatttcattctgatcttcgataacggctacttctcagagtttggcaccttctctattactgactggatcggtcacacaccgaaagcgcttctcgccaagaactttggtctgcccgaatcggcttttgatgggtttccccagaaagaggtctattttgcacgtggcgcggttccaccagccacccctgcagcgcctttacagggactggtattgccaccactcacgcataaatacgaactcctcgaacaagaacctcataaagttttcaaaggtggtcgtgaatggcgcgtggatagctcgcgttttcccatttccaagactgtaaccggcgttgttcttgatttggaacccggcgcgttacgcgagcttcactggcatcctaatgctgacgagtggcaatatgtgatcgatggcaacattagtgtgacgatgttcggttctcatggccgttaccgcaccgaacagatggagaagggtgatgtcgggtatattccacaggggtatggccacagcatcgaaaatgtgggagatcgtccatgtcgcgtcttgattggctttaacacaggtaactaccaagcgatcgacttatcacagtggattgcaggtaatcccgcggatgttcttgccacgaacttctccaaacccaccagcctctttgaaaagttcccaaaacaggacgtgtttattgctcctggcaagggccaaactggccaccatcaccatcaccat

SEQ ID NO: 502 - protein, 369 aa, synthetic construct
  REGION 1..369: note = Variant of oxalate decarboxylase from Gemmata sp. SH-PL17
MGDPTFMNNVPDHLLSGKDLPTFKFELEKSKGKVIGKSSGKEATVVQLPISKGIAGVSMTLEPGAMRELHWHATAAEWAFVLTGHVRTTVIDPQGAAETNDFGPGDVWYFPRGHGHMLECLGDKPAHFILIFDNGYFSEFGTFSITDWIGHTPKALLAKNFGLPESAFDGFPQKEVYFARGAVPPATPAAPLQGLVLPPLTHKYELLEQEPHKVFKGGREWRVDSSRFPISKTVTGVVLDLEPGALRELHWHPNADEWQYVIDGNISVTMFGSHGRYRTEQMEKGDVGYIPQGYGHSIENVGDRPCRVLIGFNTGNYQAIDLSQWIAGNPADVLATNFSKPTSLFEKFPKQDVFIAPGKGQTGHHHHHH

SEQ ID NO: 503 - DNA, 1107 bp, synthetic construct
  misc_feature 1..1107: note = Variant of oxalate decarboxylase from Gemmata sp. SH-PL17
  source 1..1107: mol_type = other DNA
atgggtgatccgacctttatgaataatgtgccagaccatctgctgtcgggtaaagatttgccgacgttcaagtttgaactggaaaagagcaagggcaaagtcattgggaaaagttcgggaaaagaagcaaccgttgttcagttacctatctccaaaggcattgctggtgtgagcatgactcttgaaccgggtgcgatgcgcgaattgcactggcatgccacagcagcagagtgggctttcgtattagagggccacgtccgtacgacggtgatcgatccacaaggtgcggccgaaaccaacgactttggaccgggcgacgtgtggtattttcctcgcggtcatgggcacatgctggaatgcctgggcgataaaccggcgcatttcattctgatcttcgataacggctacttctcagagtttggcaccttctctattactgactggatcggtcacacaccgaaagcgcttctcgccaagaactttggtctgcccgaatcggcttttgatgggtttcccaagaaagaggtctattttgcacgtggcgcggttccaccagccacccctgcagcgcctttacagggactggtattgccaccactcacgcataaatacgaactcctcgaacaagaacctcataaagttttcaaaggtggtcgtgaatggcgcgtggatagctcggaatttcccatttccaagactgtaaccggcgttgttcttgatttggaacccggcgcgttacgcgagcttcactggcatcctaatgctgacgagtggcaatatgtgatcgatggcaacattagtgtgacgatgttcggttctcatggccgttaccgcaccgaacagatggagaagggtgatgtcgggtatattccacaggggtatggccacagcatcgaaaatgtgggagatcgtccatgtcgcgtcttgattggctttaacacaggtaactaccaagcgatcgacttatcacagtggattgcaggtaatcccgcggatgttcttgccacgaacttctccaaacccaccagcctctttgaaaagttcccaaaacaggacgtgtttattgctcctggcaagggccaaactggccaccatcaccatcaccat

SEQ ID NO: 504 - protein, 369 aa, synthetic construct
  REGION 1..369: note = Variant of oxalate decarboxylase from Gemmata sp. SH-PL17
MGDPTFMNNVPDHLLSGKDLPTFKFELEKSKGKVIGKSSGKEATVVQLPISKGIAGVSMTLEPGAMRELHWHATAAEWAFVLEGHVRTTVIDPQGAAETNDFGPGDVWYFPRGHGHMLECLGDKPAHFILIFDNGYFSEFGTFSITDWIGHTPKALLAKNFGLPESAFDGFPKKEVYFARGAVPPATPAAPLQGLVLPPLTHKYELLEQEPHKVFKGGREWRVDSSEFPISKTVTGVVLDLEPGALRELHWHPNADEWQYVIDGNISVTMFGSHGRYRTEQMEKGDVGYIPQGYGHSIENVGDRPCRVLIGFNTGNYQAIDLSQWIAGNPADVLATNFSKPTSLFEKFPKQDVFIAPGKGQTGHHHHHH

SEQ ID NO: 505 - DNA, 1107 bp, synthetic construct
  misc_feature 1..1107: note = Variant of oxalate decarboxylase from Gemmata sp. SH-PL17
  source 1..1107: mol_type = other DNA
atgggtgatccgacctttatgaataatgtgccagaccatctgctgtcgggtaaagatttgccgacgttcaagtttgaactggaaaagagcaagggcaaagtcattgggaaaagttcgggaaaagaagcaaccgttgttcagttacctatctccaaaggcattgctggtgtgagcatgactcttgaaccgggtgcgatgcgcgaattgcactggcatgccacagcagcagagtgggctttcgtattaaccggccacgtccgtacgacggtgatcgatccacaaggtgcggccgaaaccaacgactttggaccgggcgacgtgtggtattttcctcgcggtcatgggcacatgctggaatgcctgggcgataaaccggcgcatttcattctgatcttcgataacggctacttctcagagtttggcaccttctctattactgactggatcggtcacacaccgaaagcgcttctcgccaagaactttggtctgcccgaatcggcttttgatgggtttcccaaaaaagaggtctattttgcacgtggcgcggttccaccagccacccctgcagcgcctttacagggactggtattgccaccactcacgcataaatacgaactcctcgaacaagaacctcataaagttttcaaaggtggtcgtgaatggcgcgtggatagctcggaatttcccatttccaagactgtaaccggcgttgttcttgatttggaacccggcgcgttacgcgagcttcactggcatcctaatgctgacgagtggcaatatgtgatcgatggcaacattagtgtgacgatgttcggttctcatggccgttaccgcaccgaacagatggagaagggtgatgtcgggtatattccacaggggtatggccacagcatcgaaaatgtgggagatcgtccttgtcgcgtcttgattggctttaacacaggtaactaccaagcgatcgacttatcacagtggattgcaggtaatcccgcggatgttcttgccacgaacttctccaaacccaccagcctctttgaaaagttcccaaaacaggacgtgtttattgctcctggcaagggccaaactggccaccatcaccatcaccat

SEQ ID NO: 506 - protein, 369 aa, synthetic construct
  REGION 1..369: note = Variant of oxalate decarboxylase from Gemmata sp. SH-PL17
MGDPTFMNNVPDHLLSGKDLPTFKFELEKSKGKVIGKSSGKEATVVQLPISKGIAGVSMTLEPGAMRELHWHATAAEWAFVLTGHVRTTVIDPQGAAETNDFGPGDVWYFPRGHGHMLECLGDKPAHFILIFDNGYFSEFGTFSITDWIGHTPKALLAKNFGLPESAFDGFPKKEVYFARGAVPPATPAAPLQGLVLPPLTHKYELLEQEPHKVFKGGREWRVDSSEFPISKTVTGVVLDLEPGALRELHWHPNADEWQYVIDGNISVTMFGSHGRYRTEQMEKGDVGYIPQGYGHSIENVGDRPCRVLIGFNTGNYQAIDLSQWIAGNPADVLATNFSKPTSLFEKFPKQDVFIAPGKGQTGHHHHHH

SEQ ID NO: 507 - DNA, 1107 bp, synthetic construct
  misc_feature 1..1107: note = Variant of oxalate decarboxylase from Gemmata sp. SH-PL17
  source 1..1107: mol_type = other DNA
atgggtgatccgacctttatgaataatgtgccagaccatctgctgtcgggtaaagatttgccgacgttcaagtttgaactggaaaagagcaagggcaaagtcattgggaaaagttcgggaaaagaagcaaccgttgttcagttacctatctccaaaggcattgctggtgtgagcatgactcttgaaccgggtgcgatgcgcgaattgcactggcatgccacagcagcagagtgggctttcgtattaaccggccacgtccgtacgacggtgatcgatccacaaggtgcggccgaaaccaacgactttggaccgggcgacgtgtggtattttcctcgcggtcatgggcacatgctggaatgcctgggcgataaaccagcgcatttcattctgatcttcgataacggctacttctcagagtttggcaccttctctattactgactggatcggtcacacaccgaaagcgcttctcgccaagaactttggtctgcccgaatcggcttttgatgggtttcccaagaaagaggtctattttgcacgtggcgcggttccaccagccacccctgcagcgcctttacagggactggtattgccaccactcacgcataaatacgaactcctcgaacaagaacctcataaagttttcaaaggtggtcgtgaatggcgcgtggatagctcgcgttttcccatttccaagactgtaaccggcgttgttcttgatttggaacccggcgcgttacgcgagcttcactggcatcctaatgctgacgagtggcaatatgtgatcgatggcaacattagtgtgacgatgttcggttctcatggccgttaccgcaccgaacagatggagaagggtgatgtcgggtatattccacaggggtatggccacagcatcgaaaatgtgggagatcgtccttgtcgcgtcttgattggctttaacacaggtaactaccaagcgatcgacttatcacagtggattgcaggtaatcccgcggatgttcttgccacgaacttctccaaacccaccagcctctttgaaaagttcccaaaacaggacgtgtttattgctcctggcaagggccaaactggccaccatcaccatcaccat

SEQ ID NO: 508 - protein, 369 aa, synthetic construct
  REGION 1..369: note = Variant of oxalate decarboxylase from Gemmata sp. SH-PL17
MGDPTFMNNVPDHLLSGKDLPTFKFELEKSKGKVIGKSSGKEATVVQLPISKGIAGVSMTLEPGAMRELHWHATAAEWAFVLTGHVRTTVIDPQGAAETNDFGPGDVWYFPRGHGHMLECLGDKPAHFILIFDNGYFSEFGTFSITDWIGHTPKALLAKNFGLPESAFDGFPKKEVYFARGAVPPATPAAPLQGLVLPPLTHKYELLEQEPHKVFKGGREWRVDSSRFPISKTVTGVVLDLEPGALRELHWHPNADEWQYVIDGNISVTMFGSHGRYRTEQMEKGDVGYIPQGYGHSIENVGDRPCRVLIGFNTGNYQAIDLSQWIAGNPADVLATNFSKPTSLFEKFPKQDVFIAPGKGQTGHHHHHH

SEQ ID NO: 509 - DNA, 1107 bp, synthetic construct
  misc_feature 1..1107: note = Variant of oxalate decarboxylase from Gemmata sp. SH-PL17
  source 1..1107: mol_type = other DNA
atgggtgatccgacctttatgaataatgtgccagaccatctgctgtcgggtaaagatttgccgacgttcaagtttgaactggaaaagagcaagggcaaagtcattgggaaaagttcgggaaaagaagcaaccgttgttcagttacctatctccaaaggcattgctggtgtgagcatgactcttgaaccgggtgcgatgcgcgaattgcactggcatgccacagcagcagagtgggctttcgtattaaccggccacgtccgtacgacggtgatcgatccacaaggtgcggccgaaaccaacgactttggaccgggcgacgtgtggtattttcctcgcggtcatgggcacatgctggaatgcctgggcgataaagaggcgcatttcattctgatcttcgataacggctacttctcagagtttggcaccttctctattactgactggatcggtcacacaccgaaagcgcttctcgccaagaactttggtctgcccgaatcggcttttgatgggtttcccaagaaagaggtctattttgcacgtggcgcggttccaccagccacccctgcagcgcctttacagggactggtattgccaccactcacgcataaatacgaactcctcgaacaagaacctcataaagttttcaaaggtggtcgtgaatggcgcgtggatagctcggaatttcccatttccaagactgtaaccggcgttgttcttgatttggaacccggcgcgttacgcgagcttcactggcatcctaatgctgacgagtggcaatatgtgatcgatggcaacattagtgtgacgatgttcggttctcatggccgttaccgcaccgaacagatggagaagggtgatgtcgggtatattccacaggggtatggccacagcatcgaaaatgtgggagatcgtccatgtcgcgtcttgattggctttaacacaggtaactaccaagcgatcgacttatcacagtggattgcaggtaatcccgcggatgttcttgccacgaacttctccaaacccaccagcctctttgaaaagttcccaaaacaggacgtgtttattgctcctggcaagggccaaactggccaccatcaccatcaccat

SEQ ID NO: 510 - protein, 369 aa, synthetic construct
  REGION 1..369: note = Variant of oxalate decarboxylase from Gemmata sp. SH-PL17
MGDPTFMNNVPDHLLSGKDLPTFKFELEKSKGKVIGKSSGKEATVVQLPISKGIAGVSMTLEPGAMRELHWHATAAEWAFVLTGHVRTTVIDPQGAAETNDFGPGDVWYFPRGHGHMLECLGDKEAHFILIFDNGYFSEFGTFSITDWIGHTPKALLAKNFGLPESAFDGFPKKEVYFARGAVPPATPAAPLQGLVLPPLTHKYELLEQEPHKVFKGGREWRVDSSEFPISKTVTGVVLDLEPGALRELHWHPNADEWQYVIDGNISVTMFGSHGRYRTEQMEKGDVGYIPQGYGHSIENVGDRPCRVLIGFNTGNYQAIDLSQWIAGNPADVLATNFSKPTSLFEKFPKQDVFIAPGKGQTGHHHHHH

SEQ ID NO: 511 - DNA, 1107 bp, synthetic construct
  misc_feature 1..1107: note = Variant of oxalate decarboxylase from Gemmata sp. SH-PL17
  source 1..1107: mol_type = other DNA
atgggtgatccgacctttatgaataatgtgccagaccatctgctgtcgggtaaagatttgccgacgttcaagtttgaactggaaaagagcaagggcaaagtcattgggaaaagttcgggaaaagaagcaaccgttgttcagttacctatctccaaaggcattgctggtgtgagcatgactcttgaaccgggtgcgatgcgcgaattgcactggcatgccacagcagcagagtgggctttcgtattagagggccacgtccgtacgacggtgatcgatccacaaggtgcggccgaaaccaacgactttgggccgggcgacgtgtggtattttcctcgcggtcatgggcacatgctggaatgcctgggcgataaaccggcgcatttcattctgatcttcgataacggctacttctcagagtttggcaccttctctattactgactggatcggtcacacaccgaaagcgcttctcgccaagaactttggtctgcccgaatcggcttttgatgggtttcccaaaaaagaggtctattttgcacgtggcgcggttccaccagccacccctgcagcgcctttacagggactggtattgccaccactcacgcataaatacgaactcctcgaacaagaacctcataaagttttcaaaggtggtcgtgaatggcgcgtggatagctcgcgttttcccatttccaagactgtaaccggcgttgttcttgatttggaacccggcgcgttacgcgagcttcactggcatcctaatgctgacgagtggcaatatgtgatcgatggcaacattagtgtgacgatgttcggttctcatggccgttaccgcaccgaacagatggagaagggtgatgtcgggtatattccacaggggtatggccacagcatcgaaaatgtgggagatcgtccatgtcgcgtcttgattggctttaacacaggtaactaccaagcgatcgacttatcacagtggattgcaggtaatcccgcggatgttcttgccacgaacttctccaaacccaccagcctctttgaaaagttcccaaaacaggacgtgtttattgctcctggcaagggccaaactggccaccatcaccatcaccat

SEQ ID NO: 512 - protein, 369 aa, synthetic construct
  REGION 1..369: note = Variant of oxalate decarboxylase from Gemmata sp. SH-PL17
MGDPTFMNNVPDHLLSGKDLPTFKFELEKSKGKVIGKSSGKEATVVQLPISKGIAGVSMTLEPGAMRELHWHATAAEWAFVLEGHVRTTVIDPQGAAETNDFGPGDVWYFPRGHGHMLECLGDKPAHFILIFDNGYFSEFGTFSITDWIGHTPKALLAKNFGLPESAFDGFPKKEVYFARGAVPPATPAAPLQGLVLPPLTHKYELLEQEPHKVFKGGREWRVDSSRFPISKTVTGVVLDLEPGALRELHWHPNADEWQYVIDGNISVTMFGSHGRYRTEQMEKGDVGYIPQGYGHSIENVGDRPCRVLIGFNTGNYQAIDLSQWIAGNPADVLATNFSKPTSLFEKFPKQDVFIAPGKGQTGHHHHHH

SEQ ID NO: 513 - DNA, 1107 bp, synthetic construct
  misc_feature 1..1107: note = Variant of oxalate decarboxylase from Gemmata sp. SH-PL17
  source 1..1107: mol_type = other DNA
atgggtgatccgacctttatgaataatgtgccagaccatctgctgtcgggtaaagatttgccgacgttcaagtttgaactggaaaagagcaagggcaaagtcattgggaaaagttcgggaaaagaagcaaccgttgttcagttacctatctccaaaggcattgctggtgtgagcatgactcttgaaccgggtgcgatgcgcgaattgcactggcatgccacagcagcagagtgggctttcgtattaaccggccacgtccgtacgacggtgatcgatccacaaggtgcggccgaaaccaacgactttgggccgggcgacgtgtggtattttcctcgcggtcatgggcacatgctggaatgcctgggcgataaaccagcgcatttcattctgatcttcgataacggctacttctcagagtttggcaccttctctattactgactggatcggtcacacaccgaaagcgcttctcgccaagaactttggtctgcccgaatcggcttttgatgggtttcccaagaaagaggtctattttgcacgtggcgcggttccaccagccacccctgcagcgcctttacagggactggtattgccaccactcacgcataaatacgaactcctcgaacaagaacctcataaagttttcaaaggtggtcgtgaatggcgcgtggatagctcgcgttttcccatttccaagactgtaaccggcgttgttcttgatttggaacccggcgcgttacgcgagcttcactggcatcctaatgctgacgagtggcaatatgtgatctcgggcaacattagtgtgacgatgttcggttctcatggccgttaccgcaccgaacagatggagaagggtgatgtcgggtatattccacaggggtatggccacagcatcgaaaatactggagatcgtccatgtcgcgtcttgattggctttaacacaggtaactaccaagcgatcgacttatcacagtggattgcaggtaatcccgcggatgttcttgccacgaacttctccaaacccaccagcctctttgaaaagttcccaaaacaggacgtgtttattgctcctggcaagggccaaactggccaccatcaccatcaccat

SEQ ID NO: 514 - protein, 369 aa, synthetic construct
  REGION 1..369: note = Variant of oxalate decarboxylase from Gemmata sp. SH-PL17
MGDPTFMNNVPDHLLSGKDLPTFKFELEKSKGKVIGKSSGKEATVVQLPISKGIAGVSMTLEPGAMRELHWHATAAEWAFVLTGHVRTTVIDPQGAAETNDFGPGDVWYFPRGHGHMLECLGDKPAHFILIFDNGYFSEFGTFSITDWIGHTPKALLAKNFGLPESAFDGFPKKEVYFARGAVPPATPAAPLQGLVLPPLTHKYELLEQEPHKVFKGGREWRVDSSRFPISKTVTGVVLDLEPGALRELHWHPNADEWQYVISGNISVTMFGSHGRYRTEQMEKGDVGYIPQGYGHSIENTGDRPCRVLIGFNTGNYQAIDLSQWIAGNPADVLATNFSKPTSLFEKFPKQDVFIAPGKGQTGHHHHHH

SEQ ID NO: 515 - DNA, 1107 bp, synthetic construct
  misc_feature 1..1107: note = Variant of oxalate decarboxylase from Gemmata sp. SH-PL17
  source 1..1107: mol_type = other DNA
atgggtgatccgacctttatgaataatgtgccagaccatctgctgtcggataaagatttgccgacgttcaagtttgaactggaaaagagcaagggcaaagtcattgggaaaagttcgggaaaagaagcaaccgttgttcagttacctatctccaaaggcattgctggtgtgagcatgactcttgaaccgggtgcgatgcgcgaattgcactggcatgccacagcagcagagtgggctttcgtattaaccggccacgtccgtacgacggtgatcgatccacaaggtgcggccgaaaccaacgactttggaccgggcgacgtgtggtattttcctcgcggtcatgggcacatgctggaatgcctgggcgataaaccggcgcatgctattctgatcttcgataacggctacttctcagagtttggcaccttctctattactgactggatcggtcacacaccgaaagcgcttctcgccaagaactttggtctgcccgaatcggcttttgatgggtttcccaaaaaagaggtctattttgcacgtggcgcggttccaccagccacccctgcagcgcctttacagggactggtattgccaccactcacgcataaatacgaactcctcgaacaagaacctcataaagttttcaaaggtggtcgtgaatggcgcgtggatagctcgcgttttcccatttccaagactgtaaccggcgttgttcttgatttggaacccggcgcgttacgcgagcttcactggcatcctaatgctgacgagtggcaatatgtgatcgatggcaacattagtgtgacgatgttcggttctcatggccgttaccgcaccgaacagatggagaagggtgatgtcgggtatattccacaggggtatggccacagcatcgaaaatgtgggagatcgtccttgtcgcgtcttgattggctttaacacaggtaactaccaagcgatcgacttatcacagtggattgcaggtaatcccgcggatgttcttgccacgaacttctccaaacccaccagcctctttgaaaagttcccaaaacaggacgtgtttattgctcctggcaagggccaaactggccaccatcaccatcaccat

SEQ ID NO: 516 - protein, 369 aa, synthetic construct
  REGION 1..369: note = Variant of oxalate decarboxylase from Gemmata sp. SH-PL17
MGDPTFMNNVPDHLLSDKDLPTFKFELEKSKGKVIGKSSGKEATVVQLPISKGIAGVSMTLEPGAMRELHWHATAAEWAFVLTGHVRTTVIDPQGAAETNDFGPGDVWYFPRGHGHMLECLGDKPAHAILIFDNGYFSEFGTFSITDWIGHTPKALLAKNFGLPESAFDGFPKKEVYFARGAVPPATPAAPLQGLVLPPLTHKYELLEQEPHKVFKGGREWRVDSSRFPISKTVTGVVLDLEPGALRELHWHPNADEWQYVIDGNISVTMFGSHGRYRTEQMEKGDVGYIPQGYGHSIENVGDRPCRVLIGFNTGNYQAIDLSQWIAGNPADVLATNFSKPTSLFEKFPKQDVFIAPGKGQTGHHHHHH

SEQ ID NO: 517 - DNA, 1107 bp, synthetic construct
  misc_feature 1..1107: note = Variant of oxalate decarboxylase from Gemmata sp. SH-PL17
  source 1..1107: mol_type = other DNA
atgggtgatccgacctttatgaataatgtgccagaccatctgctgtcggataaagatttgccgacgttcaagtttgaactggaaaagagcaagggcaaagtcattgggaaaagttcgggaaaagaagcaaccgttgttcagttacctatctccaaaggcattgctggtgtgagcatgactcttgaaccgggtgcgatgcgcgaattgcactggcatgccacagcaagtgagtgggctttcgtattaaccggccacgtccgtacgacggtgatcgatccacaaggtgcggccgaaaccaacgactttggaccgggcgacgtgtggtattttcctcgcggtcatgggcacatgctggaatgcctgggcgataaaccggcgcatttcattctgatcttcgataacggctacttctcagagtttggcaccttctctattactgactggatcggtcacacaccgaaagcgcttctcgccaagaactttggtctgcccgaatcggcttttgatgggtttcccaaaaaagaggtctattttgcacgtggcgcggttccaccagccacccctgcagcgcctttacagggactggtattgccaccactcacgcataaatacgaactcctcgaacaagaacctcataaagttttcaaaggtggtcgtgaatggcgcgtggatagctcgcgttttcccatttccaagactgtaaccggcgttgttcttgatttggaacccggcgcgttacgcgagcttcactggcatcctaatgctgacgagtggcaatatgtgatcgatggcaacattagtgtgacgatgttcggttctcatggccgttaccgcaccgaacagatggagaagggtgatgtcgggtatattccacaggggtatggccacagcatcgaaaatgtgggagatcgtccttgtcgcgtcttgattggctttaacacaggtaactaccaagcgatcgacttatcacagtggattgcaggtaatcccgcggatgttcttgccacgaacttctccaaacccaccagcctctttgaaaagttcccaaaacaggacgtgtttattgctcctggcaagggccaaactggccaccatcaccatcaccat

SEQ ID NO: 518 - protein, 369 aa, synthetic construct
  REGION 1..369: note = Variant of oxalate decarboxylase from Gemmata sp. SH-PL17
MGDPTFMNNVPDHLLSDKDLPTFKFELEKSKGKVIGKSSGKEATVVQLPISKGIAGVSMTLEPGAMRELHWHATASEWAFVLTGHVRTTVIDPQGAAETNDFGPGDVWYFPRGHGHMLECLGDKPAHFILIFDNGYFSEFGTFSITDWIGHTPKALLAKNFGLPESAFDGFPKKEVYFARGAVPPATPAAPLQGLVLPPLTHKYELLEQEPHKVFKGGREWRVDSSRFPISKTVTGVVLDLEPGALRELHWHPNADEWQYVIDGNISVTMFGSHGRYRTEQMEKGDVGYIPQGYGHSIENVGDRPCRVLIGFNTGNYQAIDLSQWIAGNPADVLATNFSKPTSLFEKFPKQDVFIAPGKGQTGHHHHHH

SEQ ID NO: 519 - DNA, 1107 bp, synthetic construct
  misc_feature 1..1107: note = Variant of oxalate decarboxylase from Gemmata sp. SH-PL17
  source 1..1107: mol_type = other DNA
atgggtgatccgacctttatgaataatgtgccagaccatctgctgtcggataaagatttgccgacgttcaagtttgaactggaaaagagcaagggcaaagtcattgggaaaagttcgggaaaagaagcaaccgttgttcagttacctatctccaaaggcattgctggtgtgagcatgactcttgaaccgggtgcgatgcgcgaattgcactggcatgccacagcagcagagtgggctttcgtattaaccggccacgtccgtacgacggtgatcgatccacaaggtgcggccgaaaccaacgactttggaccgggcgacgtgtggtattttcctcgcggtcatgggcacatgctggaatgcctgggcgataaaccggcgcatttcattctgatcttcgataacggctacttctcagagtttcagaccttctctattactgactggatcggtcacacaccgaaagcgcttctcgccaagaactttggtctgcccgaatcggcttttgatgggtttcccaaaaaagaggtctattttgcacgtggcgcggttccaccagccacccctgcagcgcctttacagggactggtattgccaccactcacgcataaatacgaactcctcgaacaagaacctcataaagttttcaaaggtggtcgtgaatggcgcgtggatagctcgcgttttcccatttccaagactgtaaccggcgttgttcttgatttggaacccggcgcgttacgcgagcttcactggcatcctaatgctgacgagtggcaatatgtgatcgatggcaacattagtgtgacgatgttcggttctcatggccgttaccgcaccgaacagatggagaagggtgatgtcgggtatattccacaggggtatggccacagcatcgaaaatgtgggagatcgtccttgtcgcgtcttgattggctttaacacaggtaactaccaagcgatcgacttatcacagtggattgcaggtaatcccgcggatgttcttgccacgaacttctccaaacccaccagcctctttgaaaagttcccaaaacaggacgtgtttattgctcctggcaagggccaaactggccaccatcaccatcaccat

SEQ ID NO: 520 - protein, 369 aa, synthetic construct
  REGION 1..369: note = Variant of oxalate decarboxylase from Gemmata sp. SH-PL17
MGDPTFMNNVPDHLLSDKDLPTFKFELEKSKGKVIGKSSGKEATVVQLPISKGIAGVSMTLEPGAMRELHWHATAAEWAFVLTGHVRTTVIDPQGAAETNDFGPGDVWYFPRGHGHMLECLGDKPAHFILIFDNGYFSEFQTFSITDWIGHTPKALLAKNFGLPESAFDGFPKKEVYFARGAVPPATPAAPLQGLVLPPLTHKYELLEQEPHKVFKGGREWRVDSSRFPISKTVTGVVLDLEPGALRELHWHPNADEWQYVIDGNISVTMFGSHGRYRTEQMEKGDVGYIPQGYGHSIENVGDRPCRVLIGFNTGNYQAIDLSQWIAGNPADVLATNFSKPTSLFEKFPKQDVFIAPGKGQTGHHHHHH

SEQ ID NO: 521 - DNA, 1107 bp, synthetic construct
  misc_feature 1..1107: note = Variant of oxalate decarboxylase from Gemmata sp. SH-PL17
  source 1..1107: mol_type = other DNA
atgggtgatccgacctttatgaataatgtgccagaccatctgctgtcggataaagatttgccgacgttcaagtttgaactggaaaagagcaagggcaaagtcattgggaaaagttcgggaaaagaagcaaccgttgttcagttacctatctccaaaggcattgctggtgtgagcatgactcttgaaccgggtgcgatgcgcgaattgcactggcatgccacagcagcagagtgggctttcgtattaaccggccacgtccgtacgacggtgatcgatccacaaggtgcggccgaaaccaacgactttggaccgggcgacgtgtggtatgtgcctcgcggtcatgggcacatgctggaatgcctgggcgataaaccggcgcatttcattctgatcttcgataacggctacttctcagagtttggcaccttctctattactgactggatcggtcacacaccgaaagcgcttctcgccaagaactttggtctgcccgaatcggcttttgatgggtttcccaaaaaagaggtctattttgcacgtggcgcggttccaccagccacccctgcagcgcctttacagggactggtattgccaccactcacgcataaatacgaactcctcgaacaagaacctcataaagttttcaaaggtggtcgtgaatggcgcgtggatagctcgcgttttcccatttccaagactgtaaccggcgttgttcttgatttggaacccggcgcgttacgcgagcttcactggcatcctaatgctgacgagtggcaatatgtgatcgatggcaacattagtgtgacgatgttcggttctcatggccgttaccgcaccgaacagatggagaagggtgatgtcgggtatattccacaggggtatggccacagcatcgaaaatgtgggagatcgtccttgtcgcgtcttgattggctttaacacaggtaactaccaagcgatcgacttatcacagtggattgcaggtaatcccgcggatgttcttgccacgaacttctccaaacccaccagcctctttgaaaagttcccaaaacaggacgtgtttattgctcctggcaagggccaaactggccaccatcaccatcaccat

SEQ ID NO: 522 - protein, 369 aa, synthetic construct
  REGION 1..369: note = Variant of oxalate decarboxylase from Gemmata sp. SH-PL17
MGDPTFMNNVPDHLLSDKDLPTFKFELEKSKGKVIGKSSGKEATVVQLPISKGIAGVSMTLEPGAMRELHWHATAAEWAFVLTGHVRTTVIDPQGAAETNDFGPGDVWYVPRGHGHMLECLGDKPAHFILIFDNGYFSEFGTFSITDWIGHTPKALLAKNFGLPESAFDGFPKKEVYFARGAVPPATPAAPLQGLVLPPLTHKYELLEQEPHKVFKGGREWRVDSSRFPISKTVTGVVLDLEPGALRELHWHPNADEWQYVIDGNISVTMFGSHGRYRTEQMEKGDVGYIPQGYGHSIENVGDRPCRVLIGFNTGNYQAIDLSQWIAGNPADVLATNFSKPTSLFEKFPKQDVFIAPGKGQTGHHHHHH

SEQ ID NO: 523 - DNA, 1107 bp, synthetic construct
  misc_feature 1..1107: note = Variant of oxalate decarboxylase from Gemmata sp. SH-PL17
  source 1..1107: mol_type = other DNA
atgggtgatccgacctttatgaataatgtgccagaccatctgctgtcggataaagatttgccgacgttcaagtttgaactggaaaagagcaagggcaaagtcattgggaaaagttcgggaaaagaagcaaccgttgttcagttacctatctccaaaggcattgctggtgtgagcatgactcttgaaccgggtgcgatgcgcgaattgcactggcatgccacagcagcagagtggagtttcgtattaaccggccacgtccgtacgacggtgatcgatccacaaggtgcggccgaaaccaacgactttggaccgggcgacgtgtggtattttcctcgcggtcatgggcacatgctggaatgcctgggcgataaaccggcgcatttcattctgatcttcgataacggctacttctcagagtttggcaccttctctattactgactggatcggtcacacaccgaaagcgcttctcgccaagaactttggtctgcccgaatcggcttttgatgggtttcccaaaaaagaggtctattttgcacgtggcgcggttccaccagccacccctgcagcgcctttacagggactggtattgccaccactcacgcataaatacgaactcctcgaacaagaacctcataaagttttcaaaggtggtcgtgaatggcgcgtggatagctcgcgttttcccatttccaagactgtaaccggcgttgttcttgatttggaacccggcgcgttacgcgagcttcactggcatcctaatgctgacgagtggcaatatgtgatcgatggcaacattagtgtgacgatgttcggttctcatggccgttaccgcaccgaacagatggagaagggtgatgtcgggtatattccacaggggtatggccacagcatcgaaaatgtgggagatcgtccttgtcgcgtcttgattggctttaacacaggtaactaccaagcgatcgacttatcacagtggattgcaggtaatcccgcggatgttcttgccacgaacttctccaaacccaccagcctctttgaaaagttcccaaaacaggacgtgtttattgctcctggcaagggccaaactggccaccatcaccatcaccat

SEQ ID NO: 524 - protein, 369 aa, synthetic construct
  REGION 1..369: note = Variant of oxalate decarboxylase from Gemmata sp. SH-PL17
MGDPTFMNNVPDHLLSDKDLPTFKFELEKSKGKVIGKSSGKEATVVQLPISKGIAGVSMTLEPGAMRELHWHATAAEWSFVLTGHVRTTVIDPQGAAETNDFGPGDVWYFPRGHGHMLECLGDKPAHFILIFDNGYFSEFGTFSITDWIGHTPKALLAKNFGLPESAFDGFPKKEVYFARGAVPPATPAAPLQGLVLPPLTHKYELLEQEPHKVFKGGREWRVDSSRFPISKTVTGVVLDLEPGALRELHWHPNADEWQYVIDGNISVTMFGSHGRYRTEQMEKGDVGYIPQGYGHSIENVGDRPCRVLIGFNTGNYQAIDLSQWIAGNPADVLATNFSKPTSLFEKFPKQDVFIAPGKGQTGHHHHHH

SEQ ID NO: 525 - DNA, 1107 bp, synthetic construct
  misc_feature 1..1107: note = Variant of oxalate decarboxylase from Gemmata sp. SH-PL17
  source 1..1107: mol_type = other DNA
atgggtgatccgacctttatgaataatgtgccagaccatctgctgtcggataaagatttgccgacgttcaagtttgaactggaaaagagcaagggcaaagtcattgggaaaagttcgggaaaagaagcaaccgttgttcagttacctatctccaaaggcattgctggtgtgagcatgactcttgaaccgggtgcgatgcgcgaattgcactggcatgccacagcagcagagtgggctttcgtattaaccggccacgtccgtacgacggtgatcgatccacaaggtgcggccgaaaccaacgactttggaccgggcgacgtgtggtattttcctcgcggtcatgggcacgcgctggaatgcctgggcgataaaccggcgcatttcattctgatcttcgataacggctacttctcagagtttggcaccttctctattactgactggatcggtcacacaccgaaagcgcttctcgccaagaactttggtctgcccgaatcggcttttgatgggtttcccaaaaaagaggtctattttgcacgtggcgcggttccaccagccacccctgcagcgcctttacagggactggtattgccaccactcacgcataaatacgaactcctcgaacaagaacctcataaagttttcaaaggtggtcgtgaatggcgcgtggatagctcgcgttttcccatttccaagactgtaaccggcgttgttcttgatttggaacccggcgcgttacgcgagcttcactggcatcctaatgctgacgagtggcaatatgtgatcgatggcaacattagtgtgacgatgttcggttctcatggccgttaccgcaccgaacagatggagaagggtgatgtcgggtatattccacaggggtatggccacagcatcgaaaatgtgggagatcgtccttgtcgcgtcttgattggctttaacacaggtaactaccaagcgatcgacttatcacagtggattgcaggtaatcccgcggatgttcttgccacgaacttctccaaacccaccagcctctttgaaaagttcccaaaacaggacgtgtttattgctcctggcaagggccaaactggccaccatcaccatcaccat

SEQ ID NO: 526 - protein, 369 aa, synthetic construct
  REGION 1..369: note = Variant of oxalate decarboxylase from Gemmata sp. SH-PL17
MGDPTFMNNVPDHLLSDKDLPTFKFELEKSKGKVIGKSSGKEATVVQLPISKGIAGVSMTLEPGAMRELHWHATAAEWAFVLTGHVRTTVIDPQGAAETNDFGPGDVWYFPRGHGHALECLGDKPAHFILIFDNGYFSEFGTFSITDWIGHTPKALLAKNFGLPESAFDGFPKKEVYFARGAVPPATPAAPLQGLVLPPLTHKYELLEQEPHKVFKGGREWRVDSSRFPISKTVTGVVLDLEPGALRELHWHPNADEWQYVIDGNISVTMFGSHGRYRTEQMEKGDVGYIPQGYGHSIENVGDRPCRVLIGFNTGNYQAIDLSQWIAGNPADVLATNFSKPTSLFEKFPKQDVFIAPGKGQTGHHHHHH

SEQ ID NO: 527 - DNA, 1107 bp, synthetic construct
  misc_feature 1..1107: note = Variant of oxalate decarboxylase from Gemmata sp. SH-PL17
  source 1..1107: mol_type = other DNA
atgggtgatccgacctttatgaataatgtgccagaccatctgctgtcggataaagatttgccgacgttcaagtttgaactggaaaagagcaagggcaaagtcattgggaaaagttcgggaaaagaagcaaccgttgttcagttacctatctccaaaggcattgctggtgtgagcatgactcttgaaccgggtgcgatgcgcgaattgcactggcatgccacagcagcagagtgggggttcgtattaaccggccacgtccgtacgacggtgatcgatccacaaggtgcggccgaaaccaacgactttggaccgggcgacgtgtggtattttcctcgcggtcatgggcacatgctggaatgcctgggcgataaaccggcgcatttcattctgatcttcgataacggctacttctcagagtttggcaccttctctattactgactggatcggtcacacaccgaaagcgcttctcgccaagaactttggtctgcccgaatcggcttttgatgggtttcccaaaaaagaggtctattttgcacgtggcgcggttccaccagccacccctgcagcgcctttacagggactggtattgccaccactcacgcataaatacgaactcctcgaacaagaacctcataaagttttcaaaggtggtcgtgaatggcgcgtggatagctcgcgttttcccatttccaagactgtaaccggcgttgttcttgatttggaacccggcgcgttacgcgagcttcactggcatcctaatgctgacgagtggcaatatgtgatcgatggcaacattagtgtgacgatgttcggttctcatggccgttaccgcaccgaacagatggagaagggtgatgtcgggtatattccacaggggtatggccacagcatcgaaaatgtgggagatcgtccttgtcgcgtcttgattggctttaacacaggtaactaccaagcgatcgacttatcacagtggattgcaggtaatcccgcggatgttcttgccacgaacttctccaaacccaccagcctctttgaaaagttcccaaaacaggacgtgtttattgctcctggcaagggccaaactggccaccatcaccatcaccat

SEQ ID NO: 528 - protein, 369 aa, synthetic construct
  REGION 1..369: note = Variant of oxalate decarboxylase from Gemmata sp. SH-PL17
MGDPTFMNNVPDHLLSDKDLPTFKFELEKSKGKVIGKSSGKEATVVQLPISKGIAGVSMTLEPGAMRELHWHATAAEWGFVLTGHVRTTVIDPQGAAETNDFGPGDVWYFPRGHGHMLECLGDKPAHFILIFDNGYFSEFGTFSITDWIGHTPKALLAKNFGLPESAFDGFPKKEVYFARGAVPPATPAAPLQGLVLPPLTHKYELLEQEPHKVFKGGREWRVDSSRFPISKTVTGVVLDLEPGALRELHWHPNADEWQYVIDGNISVTMFGSHGRYRTEQMEKGDVGYIPQGYGHSIENVGDRPCRVLIGFNTGNYQAIDLSQWIAGNPADVLATNFSKPTSLFEKFPKQDVFIAPGKGQTGHHHHHH

SEQ ID NO: 529 - DNA, 1107 bp, synthetic construct
  misc_feature 1..1107: note = Variant of oxalate decarboxylase from Gemmata sp. SH-PL17
  source 1..1107: mol_type = other DNA
atgggtgatccgacctttatgaataatgtgccagaccatctgctgtcggataaagatttgccgacgttcaagtttgaactggaaaagagcaagggcaaagtcattgggaaaagttcgggaaaagaagcaaccgttgttcagttacctatctccaaaggcattgctggtgtgagcatgactatggaaccgggtgcgatgcgcgaattgcactggcatgccacagcagcagagtgggctttcgtattaaccggccacgtccgtacgacggtgatcgatccacaaggtgcggccgaaaccaacgactttggaccgggcgacgtgtggtattttcctcgcggtcatgggcacatgctggaatgcctgggcgataaaccggcgcatttcattctgatcttcgataacggctacttctcagagtttggcaccttctctattactgactggatcggtcacacaccgaaagcgcttctcgccaagaactttggtctgcccgaatcggcttttgatgggtttcccaaaaaagaggtctattttgcacgtggcgcggttccaccagccacccctgcagcgcctttacagggactggtattgccaccactcacgcataaatacgaactcctcgaacaagaacctcataaagttttcaaaggtggtcgtgaatggcgcgtggatagctcgcgttttcccatttccaagactgtaaccggcgttgttcttgatttggaacccggcgcgttacgcgagcttcactggcatcctaatgctgacgagtggcaatatgtgatcgatggcaacattagtgtgacgatgttcggttctcatggccgttaccgcaccgaacagatggagaagggtgatgtcgggtatattccacaggggtatggccacagcatcgaaaatgtgggagatcgtccttgtcgcgtcttgattggctttaacacaggtaactaccaagcgatcgacttatcacagtggattgcaggtaatcccgcggatgttcttgccacgaacttctccaaacccaccagcctctttgaaaagttcccaaaacaggacgtgtttattgctcctggcaagggccaaactggccaccatcaccatcaccat

SEQ ID NO: 530 - protein, 369 aa, synthetic construct
  REGION 1..369: note = Variant of oxalate decarboxylase from Gemmata sp. SH-PL17
MGDPTFMNNVPDHLLSDKDLPTFKFELEKSKGKVIGKSSGKEATVVQLPISKGIAGVSMTMEPGAMRELHWHATAAEWAFVLTGHVRTTVIDPQGAAETNDFGPGDVWYFPRGHGHMLECLGDKPAHFILIFDNGYFSEFGTFSITDWIGHTPKALLAKNFGLPESAFDGFPKKEVYFARGAVPPATPAAPLQGLVLPPLTHKYELLEQEPHKVFKGGREWRVDSSRFPISKTVTGVVLDLEPGALRELHWHPNADEWQYVIDGNISVTMFGSHGRYRTEQMEKGDVGYIPQGYGHSIENVGDRPCRVLIGFNTGNYQAIDLSQWIAGNPADVLATNFSKPTSLFEKFPKQDVFIAPGKGQTGHHHHHH

SEQ ID NO: 531 - DNA, 1107 bp, synthetic construct
  misc_feature 1..1107: note = Variant of oxalate decarboxylase from Gemmata sp. SH-PL17
  source 1..1107: mol_type = other DNA
atgggtgatccgacctttatgaataatgtgccagaccatctgctgtcgggcaaagatttgccgacgttcaagtttgaactggaaaagagcaagggcaaagtcattgggaaaagttcgggaaaagaagcaaccgttgtccagttacctatctccaaaggcattgctggtgtgagcatgacccttgaaccgggtgcgatgcgcgaattgcactggcatgccacagcagcagagtgggggttcgtattaaccggccacgtccgtacgacggtgatcgatccacaaggtgcggccgaaaccaacgactttggaccgggcgacgtgtggtattttcctcgcggtcatgggcacatgctggaatgcctgggcgataaaccggcgcatttcattctgatcttcgataacggctacttctcagagtttggcaccttctctattactgactggatcggtcacacaccgaaagcgcttctcgccaagaactttggtctgcccgaatcggcttttgatgggtttcccaaaaaagaggtctattttgcacgtggcgcggttccaccagccacccctgcagcgcctttacagggactgaagctgccaccactcacgcataaatacgaactcctcgaacaagaacctcataaagttttcaaaggtggtcgtgaatggcgcgtggatagctcgcgttttcccatttccaagactgtaaccggcgttgttcttgatttggaacccggcgcgttacgcgagcttcactggcatcctaatgctgacgagtggcaatatgtgatcgatggcaacattagtgtgacgatgttcggttctcatggccgttaccgcaccgaacagatggagaagggtgatgtcgggtatattccacaggggtatggccacagcatcgaaaatgtgggagatcgtccttgtcgcgtcttgattggctttaacacaggtaactaccaagcgatcgacttatcacagtggattgcaggtaatcccgcggatgttcttgccacgaacttctccaaacccaccagcctctttgaaaagttcccaaaacaggacgtgtttattgctcctggcaagggccaaactggccaccatcaccatcaccat

SEQ ID NO: 532 - protein, 369 aa, synthetic construct
  REGION 1..369: note = Variant of oxalate decarboxylase from Gemmata sp. SH-PL17
MGDPTFMNNVPDHLLSGKDLPTFKFELEKSKGKVIGKSSGKEATVVQLPISKGIAGVSMTLEPGAMRELHWHATAAEWGFVLTGHVRTTVIDPQGAAETNDFGPGDVWYFPRGHGHMLECLGDKPAHFILIFDNGYFSEFGTFSITDWIGHTPKALLAKNFGLPESAFDGFPKKEVYFARGAVPPATPAAPLQGLKLPPLTHKYELLEQEPHKVFKGGREWRVDSSRFPISKTVTGVVLDLEPGALRELHWHPNADEWQYVIDGNISVTMFGSHGRYRTEQMEKGDVGYIPQGYGHSIENVGDRPCRVLIGFNTGNYQAIDLSQWIAGNPADVLATNFSKPTSLFEKFPKQDVFIAPGKGQTGHHHHHH

SEQ ID NO: 533 - DNA, 1107 bp, synthetic construct
  misc_feature 1..1107: note = Variant of oxalate decarboxylase from Gemmata sp. SH-PL17
  source 1..1107: mol_type = other DNA
atgggtgatccgacctttatgaataatgtgccagaccatgtgctgtcgggcaaagatttgccgacgttcaagtttgaactggaaaagagcaagggcaaagtcattgggaaaagttcgggaaaagaagcaaccgttgtccagttacctatctccaaaggcattgctggtgtgagcatggtgcttgaaccgggtgcgatgcgcgaattgcactggcatgccacagcagcagagtgggggttcgtattaaccggccacgtccgtacgacggtgatcgatccacaaggtgcggccgaaaccaacgactttggaccgggcgacgtgtggtattttcctcgcggtcatgggcacatgctggaatgcctgggcgataaaccggcgcatttcattctgatcttcgataacggctacttctcagagtttggcaccttctctattactgactggatcggtcacacaccgaaagcgcttctcgccaagaactttggtctgcccgaatcggcttttgatgggtttcccaaaaaagaggtctattttgcacgtggcgcggttccaccagccacccctgcagcgcctttacagggactgaagctgccaccactcacgcataaatacgaactcctcgaacaagaacctcacaaagtttttaaaggtggtcgtgaatggcgcgtggatagctcgcgttttcccatttccaagactgtaaccggcgttgttcttgatttggaacccggcgcgttacgcgagcttcactggcatcctaatgctgacgagtggcaatatgtgatcgatggcaacattagtgtgacgatgttcggttctcatggccgttaccgcaccgaacagatggagaagggtgatgtcgggtatattccacaggggtatggccacagcatcgaaaatgttggagatcgtccttgtcgcgtcttgattggctttaacacaggtaactaccaagcgatcgacttatcacagtggattgcaggtaatcccgcggatgttcttgccacgaacttctccaaacccaccagcctctttgaaaagttcccaaaacaggacgtgtttattgctcctggcaagggccaaactggccaccatcaccatcaccat

SEQ ID NO: 534 - protein, 369 aa, synthetic construct
  REGION 1..369: note = Variant of oxalate decarboxylase from Gemmata sp. SH-PL17
MGDPTFMNNVPDHVLSGKDLPTFKFELEKSKGKVIGKSSGKEATVVQLPISKGIAGVSMVLEPGAMRELHWHATAAEWGFVLTGHVRTTVIDPQGAAETNDFGPGDVWYFPRGHGHMLECLGDKPAHFILIFDNGYFSEFGTFSITDWIGHTPKALLAKNFGLPESAFDGFPKKEVYFARGAVPPATPAAPLQGLKLPPLTHKYELLEQEPHKVFKGGREWRVDSSRFPISKTVTGVVLDLEPGALRELHWHPNADEWQYVIDGNISVTMFGSHGRYRTEQMEKGDVGYIPQGYGHSIENVGDRPCRVLIGFNTGNYQAIDLSQWIAGNPADVLATNFSKPTSLFEKFPKQDVFIAPGKGQTGHHHHHH

SEQ ID NO: 535 - DNA, 1107 bp, synthetic construct
  misc_feature 1..1107: note = Variant of oxalate decarboxylase from Gemmata sp. SH-PL17
  source 1..1107: mol_type = other DNA
atgggtgatccgacctttatgaataatgtgccagaccatctgctgtcgggcaaagatttgccgacgttcaagtttgaactggaaaagagcaagggcaaagtcattgggaaaagttcgggaaaagaagcaaccgttgtccagttacctatctccaaaggcattgctggtgtgagcatgacccttgaaccgggtgcgatgcgcgaattgcactggcatgccacagcagcagagtgggggttcgtattagagggccacgtccgtacgacggtgatcgatccacaaggtgcggccgaaaccaacgactttggaccgggcgacgtgtggtattttcctcgcggtcatgggcacatgctggaatgcctgggcgataaaccggcgcatttcattctgatcttcgataacggctacttctcagagtttggcaccttctctattactgactggatcggtcacacaccgaaagcgcttctcgccaagaactttggtctgcccgaatcggcttttgatgggtttcccaaaaaagaggtctattttgcacgtggcgcggttccaccagccacccctgcagcgcctttacagggactgaagctgccaccactcacgcataaatacgaactcctcgaacaagaacctcataaagttttcaaaggtggtcgtgaatggcgcgtggatagctcgcgttttcccatttccaagactgtaaccggcgttgttcttgatttggaacccggcgcgttacgcgagcttcactggcatcctaatgctgacgagtggcaatatgtgatcgatggcaacattagtgtgacgatgttcggttctcatggccgttaccgcaccgaacagatggagaagggtgatgtcgggtatattccacaggggtatggccacagcatcgaaaatgttggagatcgtccttgtcgcgtcttgattggctttaacacaggtaactaccaagcgatcgacttatcacagtggattgcaggtaatcccgcggatgttcttgccacgaacttctccaaacccaccagcctctttgaaaagttcccaaaacaggacgtgtttattgctcctggcaagggccaaactggccaccatcaccatcaccat

SEQ ID NO: 536 - protein, 369 aa, synthetic construct
  REGION 1..369: note = Variant of oxalate decarboxylase from Gemmata sp. SH-PL17
MGDPTFMNNVPDHLLSGKDLPTFKFELEKSKGKVIGKSSGKEATVVQLPISKGIAGVSMTLEPGAMRELHWHATAAEWGFVLEGHVRTTVIDPQGAAETNDFGPGDVWYFPRGHGHMLECLGDKPAHFILIFDNGYFSEFGTFSITDWIGHTPKALLAKNFGLPESAFDGFPKKEVYFARGAVPPATPAAPLQGLKLPPLTHKYELLEQEPHKVFKGGREWRVDSSRFPISKTVTGVVLDLEPGALRELHWHPNADEWQYVIDGNISVTMFGSHGRYRTEQMEKGDVGYIPQGYGHSIENVGDRPCRVLIGFNTGNYQAIDLSQWIAGNPADVLATNFSKPTSLFEKFPKQDVFIAPGKGQTGHHHHHH

SEQ ID NO: 537 - DNA, 1107 bp, synthetic construct
  misc_feature 1..1107: note = Variant of oxalate decarboxylase from Gemmata sp. SH-PL17
  source 1..1107: mol_type = other DNA
atgggtgatccgacctttatgaataatgtgccagaccatctgctgtcgggcaaagatttgccgacgttcaagtttgaactggaaaagagcaagggcaaagtcattgggaaaagttcgggaaaagaagcaaccgttgtccagttacctatctccaaaggcattgctggtgtgagcatgacccttgaaccgggtgcgatgcgcgaattgcactggcatgccacagcagcagagtgggggttcgtattaaccggccacgtccgtacgacggtgatcgatccacaaggtgcggccgaaaccaacgactttggaccgggcgacgtgtggtattttcctcgcggtcatgggcacatgctggaatgcctgggcgataaaccggcgcatttcattctgatcttcgataacggctacttctcagagtttggcaccttctctattactgactggatcggtcacacaccgaaagcgcttctcgccaagaactttggtctgcccgaatcggcttttgatgggtttcccaaaaaagaggtctattttgcacgtggcgcggttccaccagccacccctgcagcgcctttacagggactgaagctgccaccactcacgcataaatacgaactcctcgaacaagaacctcataaagttttcaaaggtggtcgtgaatggcgcgtggatagctcgcgttttcccatttccaagactgtaaccggcgttgttcttgatttggaacccggcgcgttacgcgagcttcactggcatcctaatgctgacgagtggcaatatgtgatcgatggcaacattagtgtgacgatgttcggttctcatggccgttaccgcaccgaacagatggagaagggtgatgtcgggtatattccacaggggtatggccacagcatcgaaaatattggagatcgtccttgtcgcgtcttgattggctttaacacaggtaactaccaagcgatcgacttatcacagtggattgcaggtaatcccgcggatgttcttgccacgaacttctccaaacccaccagcctctttgaaaagttcccaaaacaggacgtgtttattgctcctggcaagggccaaactggccaccatcaccatcaccat

SEQ ID NO: 538 - protein, 369 aa, synthetic construct
  REGION 1..369: note = Variant of oxalate decarboxylase from Gemmata sp. SH-PL17
MGDPTFMNNVPDHLLSGKDLPTFKFELEKSKGKVIGKSSGKEATVVQLPISKGIAGVSMTLEPGAMRELHWHATAAEWGFVLTGHVRTTVIDPQGAAETNDFGPGDVWYFPRGHGHMLECLGDKPAHFILIFDNGYFSEFGTFSITDWIGHTPKALLAKNFGLPESAFDGFPKKEVYFARGAVPPATPAAPLQGLKLPPLTHKYELLEQEPHKVFKGGREWRVDSSRFPISKTVTGVVLDLEPGALRELHWHPNADEWQYVIDGNISVTMFGSHGRYRTEQMEKGDVGYIPQGYGHSIENIGDRPCRVLIGFNTGNYQAIDLSQWIAGNPADVLATNFSKPTSLFEKFPKQDVFIAPGKGQTGHHHHHH

SEQ ID NO: 539 - DNA, 1107 bp, synthetic construct
  misc_feature 1..1107: note = Variant of oxalate decarboxylase from Gemmata sp. SH-PL17
  source 1..1107: mol_type = other DNA
atgggtgatccgacctttatgaataatgtgccagaccatgtgctgtcgggcaaagatttgccgacgttcaagtttgaactggaaaagagcaagggcaaagtcattgggaaaagttcgggaaaagaagcaaccgttgtccagttacctatctccaaaggcattgctggtgtgagcatggtgcttgaaccgggtgcgatgcgcgaattgcactggcatgccacagcagcagagtgggggttcgtattaaccggccacgtccgtacgacggtgatcgatccacaaggtgcggccgaaaccaacgactttggaccgggcgacgtgtggtattttcctcgcggtcatgggcacatgctggaatgcctgggcgataaaccggcgcatttcattctgatcttcgataacggctacttctcagagtttggcaccttctctattactgactggatcggtcacacaccgaaagcgcttctcgccaagaactttggtctgcccgaatcggcttttgatgggtttcccaaaaaagaggtctattttgcacgtggcgcggttccaccagccacccctgcagcgcctttacagggactgaagctgccaccactcacgcataaatacgaactcctcgaacaagaacctagcaaagtttttaaaggtggtcgtgaatggcgcgtggatagctcgcgttttcccatttccaagactgtaaccggcgttgttcttgatttggaacccggcgcgttacgcgagcttcactggcatcctaatgctgacgagtggcaatatgtgatcgatggcaacattagtgtgacgatgttcggttctcatggccgttaccgcaccgaacagatggagaagggtgatgtcgggtatattccacaggggtatggccacagcatcgaaaatgttggagatcgtccttgtcgcgtcttgattggctttaacacaggtaactaccaagcgatcgacttatcacagtggattgcaggtaatcccgcggatgttcttgccacgaacttctccaaacccaccagcctctttgaaaagttcccaaaacaggacgtgtttattgctcctggcaagggccaaactggccaccatcaccatcaccat

SEQ ID NO: 540 - protein, 369 aa, synthetic construct
  REGION 1..369: note = Variant of oxalate decarboxylase from Gemmata sp. SH-PL17
MGDPTFMNNVPDHVLSGKDLPTFKFELEKSKGKVIGKSSGKEATVVQLPISKGIAGVSMVLEPGAMRELHWHATAAEWGFVLTGHVRTTVIDPQGAAETNDFGPGDVWYFPRGHGHMLECLGDKPAHFILIFDNGYFSEFGTFSITDWIGHTPKALLAKNFGLPESAFDGFPKKEVYFARGAVPPATPAAPLQGLKLPPLTHKYELLEQEPSKVFKGGREWRVDSSRFPISKTVTGVVLDLEPGALRELHWHPNADEWQYVIDGNISVTMFGSHGRYRTEQMEKGDVGYIPQGYGHSIENVGDRPCRVLIGFNTGNYQAIDLSQWIAGNPADVLATNFSKPTSLFEKFPKQDVFIAPGKGQTGHHHHHH

SEQ ID NO: 541 - DNA, 1107 bp, synthetic construct
  misc_feature 1..1107: note = Variant of oxalate decarboxylase from Gemmata sp. SH-PL17
  source 1..1107: mol_type = other DNA
atgggtgatccgacctttatgaataatgtgccagaccctctgctgtcgggcaaagatttgccgacgttcaagtttgaactggaaaagagcaagggcaaagtcattgggaaaagttcgggaaaagaagcaaccgttgtccagttacctatctccaaaggcattgctggtgtgagcatggtgcttgaaccgggtgcgatgcgcgaattgcactggcatgccacagcagcagagtgggcgttcgtattaaccggccacgtccgtacgacggtgatcgatccacaaggtgcggccgaaaccaacgactttggaccgggcgacgtgtggtattttcctcgcggtcatgggcacatgctggaatgcctgggcgataaaccggcgcatttcattctgatcttcgataacggctacttctcagagtttggcaccttctctattactgactggatcggtcacacaccgaaagcgcttctcgccaagaactttggtctgcccgaatcggcttttgatgggtttcccaaaaaagaggtctattttgcacgtggcgcggttccaccagccacccctgcagcgcctttacagggactgaaggagccaccactcacgcataaatacgaactcctcgaacaagaacctcacaaagtttttaaaggtggtcgtgaatggcgcgtggatagctcgcgttttcccatttccaagactgtaaccggcgttgttcttgatttggaacccggcgcgttacgcgagcttcactggcatcctaatgctgacgagtggcaatatgtgatcgatggcaacattagtgtgacgatgttcggttctcatggccgttaccgcaccgaacagatggagaagggtgatgtcgggtatattccacaggggtatggccacagcatcgaaaatgttggagatcgtccttgtcgcgtcttgattggctttaacacaggtaactaccaagcgatcgacttatcacagtggattgcaggtaatcccgcggatgttcttgccacgaacttctccaaacccaccagcctctttgaaaagttcccaaaacaggacgtgtttattgctcctggcaagggccaaactggccaccatcaccatcaccat

SEQ ID NO: 542 - protein, 369 aa, synthetic construct
  REGION 1..369: note = Variant of oxalate decarboxylase from Gemmata sp. SH-PL17
MGDPTFMNNVPDPLLSGKDLPTFKFELEKSKGKVIGKSSGKEATVVQLPISKGIAGVSMVLEPGAMRELHWHATAAEWAFVLTGHVRTTVIDPQGAAETNDFGPGDVWYFPRGHGHMLECLGDKPAHFILIFDNGYFSEFGTFSITDWIGHTPKALLAKNFGLPESAFDGFPKKEVYFARGAVPPATPAAPLQGLKEPPLTHKYELLEQEPHKVFKGGREWRVDSSRFPISKTVTGVVLDLEPGALRELHWHPNADEWQYVIDGNISVTMFGSHGRYRTEQMEKGDVGYIPQGYGHSIENVGDRPCRVLIGFNTGNYQAIDLSQWIAGNPADVLATNFSKPTSLFEKFPKQDVFIAPGKGQTGHHHHHH

SEQ ID NO: 543 - DNA, 1107 bp, synthetic construct
  misc_feature 1..1107: note = Variant of oxalate decarboxylase from Gemmata sp. SH-PL17
  source 1..1107: mol_type = other DNA
atgggtgatccgacctttatgaataatgtgccagaccatctgctgtcgcataaagatttgccgacgttcaagtttgaactggaaaagagcaagggcaaagtcattgggaaaagttcgggaaaagaagcaaccgttgtccagttacctatctccaaaggcattgctggtgtgagcatggtgcttgaaccgggtgcgatgcgcgaattgcactggcatgccacagcagcagagtgggctttcgtattaaccggccacgtccgtacgacggtgatcgatccacaaggtgcggccgaaaccaacgactttggaccgggcgacgtgtggtattttcctcgcggtcatgggcacatgctggaatgcctgggcgataaaccggcgcatttcattctgatcttcgataacggctacttctcagagtttggcaccttctctattactgactggatcggtcacacaccgaaagcgcttctcgccaagaactttggtctgcccgaatcggcttttgatgggtttcccaaaaaagaggtctattttgcacgtggcgcggttccaccagccacccctgcagcgcctttacagggactgaagctgccaccactcacgcataaatacgaactcctcgaacaagaacctagcaaagtttttaaaggtggtcgtgaatggcgcgtggatagctcgcgttttcccatttccaagactgtaaccggcgttgttcttgatttggaacccggcgcgttacgcgagcttcactggcatcctaatgctgacgagtggcaatatgtgatcgatggcaacattagtgtgacgatgttcggttctcatggccgttaccgcaccgaacagatggagaagggtgatgtcgggtatattccacaggggtatggccacagcatcgaaaatgtgggagatcgtccttgtcgcgtcttgattggctttaacacaggtaactaccaagcgatcgacttatcacagtggattgcaggtaatcccgcggatgttcttgccacgaacttctccaaacccaccagcctctttgaaaagttcccaaaacaggacgtgtttattgctcctggcaagggccaaactggccaccatcaccatcaccat

SEQ ID NO: 544 - protein, 369 aa, synthetic construct
  REGION 1..369: note = Variant of oxalate decarboxylase from Gemmata sp. SH-PL17
MGDPTFMNNVPDHLLSHKDLPTFKFELEKSKGKVIGKSSGKEATVVQLPISKGIAGVSMVLEPGAMRELHWHATAAEWAFVLTGHVRTTVIDPQGAAETNDFGPGDVWYFPRGHGHMLECLGDKPAHFILIFDNGYFSEFGTFSITDWIGHTPKALLAKNFGLPESAFDGFPKKEVYFARGAVPPATPAAPLQGLKLPPLTHKYELLEQEPSKVFKGGREWRVDSSRFPISKTVTGVVLDLEPGALRELHWHPNADEWQYVIDGNISVTMFGSHGRYRTEQMEKGDVGYIPQGYGHSIENVGDRPCRVLIGFNTGNYQAIDLSQWIAGNPADVLATNFSKPTSLFEKFPKQDVFIAPGKGQTGHHHHHH

SEQ ID NO: 545 - DNA, 1107 bp, synthetic construct
  misc_feature 1..1107: note = Variant of oxalate decarboxylase from Gemmata sp. SH-PL17
  source 1..1107: mol_type = other DNA
atgggtgatccgacctttatgaataatgtgccagaccatgtgctgtcgggcaaagatttgccgacgttcaagtttgaactggaaaagagcaagggcaaagtcattgggaaaagttcgggaaaagaagcaaccgttgtccagttacctatctccaaaggcattgctggtgtgagcatggtgcttgaaccgggtgcgatgcgcgaattgcactggcatgccacagcagcagagtgggggttcgtattagagggccacgtccgtacgacggtgatcgatccacaaggtgcggccgaaaccaacgactttggaccgggcgacgtgtggtattttcctcgcggtcatgggcacatgctggaatgcctgggcgataaaccggcgcatttcattctgatcttcgataacggctacttctcagagtttggcaccttctctattactgactggatcggtcacacaccgaaagcgcttctcgccaagaactttggtctgcccgaatcggcttttgatgggtttcccaaaaaagaggtctattttgcacgtggcgcggttccaccagccacccctgcagcgcctttacagggactgaagctgccaccactcacgcataaatacgaactcctcgaacaagaacctcacaaagtttttaaaggtggtcgtgaatggcgcgtggatagctcgcgttttcccatttccaagactgtaaccggcgttgttcttgatttggaacccggcgcgttacgcgagcttcactggcatcctaatgctgacgagtggcaatatgtgatcgatggcaacattagtgtgacgatgttcggttctcatggccgttaccgcaccgaacagatggagaagggtgatgtcgggtatattccacaggggtatggccacagcatcgaaaatattggagatcgtccttgtcgcgtcttgattggctttaacacaggtaactaccaagcgatcgacttatcacagtggattgcaggtaatcccgcggatgttcttgccacgaacttctccaaacccaccagcctctttgaaaagttcccaaaacaggacgtgtttattgctcctggcaagggccaaactggccaccatcaccatcaccat

SEQ ID NO: 546 - protein, 369 aa, synthetic construct
  REGION 1..369: note = Variant of oxalate decarboxylase from Gemmata sp. SH-PL17
MGDPTFMNNVPDHVLSGKDLPTFKFELEKSKGKVIGKSSGKEATVVQLPISKGIAGVSMVLEPGAMRELHWHATAAEWGFVLEGHVRTTVIDPQGAAETNDFGPGDVWYFPRGHGHMLECLGDKPAHFILIFDNGYFSEFGTFSITDWIGHTPKALLAKNFGLPESAFDGFPKKEVYFARGAVPPATPAAPLQGLKLPPLTHKYELLEQEPHKVFKGGREWRVDSSRFPISKTVTGVVLDLEPGALRELHWHPNADEWQYVIDGNISVTMFGSHGRYRTEQMEKGDVGYIPQGYGHSIENIGDRPCRVLIGFNTGNYQAIDLSQWIAGNPADVLATNFSKPTSLFEKFPKQDVFIAPGKGQTGHHHHHH

SEQ ID NO: 547 - DNA, 1107 bp, synthetic construct
  misc_feature 1..1107: note = Variant of oxalate decarboxylase from Gemmata sp. SH-PL17
  source 1..1107: mol_type = other DNA
atgggtgatccgacctttatgaataatgtgccagaccatctgctgtcgggcaaagatttgccgacgttcaagtttgaactggaaaagagcaagggcaaagtcattgggaaaagttcgggaaaagaagcaaccgttgtccagttacctatctccaaaggcattgctggtgtgagcatggtgcttgaaccgggtgcgatgcgcgaattgcactggcatgccacagcagcagagtgggggttcgtattaaccggccacgtccgtacgacggtgatcgatccacaaggtgcggccgaaaccaacgactttggaccgggcgacgtgtggtattttcctcgcggtcatgggcacatgctggaatgcctgggcgataaaccggcgcatttcattctgatcttcgataacggctacttctcagagtttggcaccttctctattactgactggatcggtcacacaccgaaagcgcttctcgccaagaactttggtctgcccgaatcggcttttgatgggtttcccaaaaaagaggtctattttgcacgtggcgcggttccaccagccacccctgcagcgcctttacagggactgaagctgccaccactcacgcataaatacgaactcctcgaacaagaacctcataaagttttcaaaggtggtcgtgaatggcgcgtggatagctcgcgttttcccatttccaagactgtaaccggcgttgttcttgatttggaacccggcgcgttacgcgagcttcactggcatcctaatgctgacgagtggcaatatgtgatcgatggcaacattagtgtgacgatgttcggttctcatggccgttaccgcaccgaacagatggagaagggtgatgtcgggtatattccacaggggtatggccacagcatcgaaaatgttggagatcgtccttgtcgcgtcttgattggctttaacacaggtaactaccaagcgatcgacttatcacagtggattgcaggtaatcccgcggatgttcttgccacgaacttctccaaacccaccagcctctttgaaaagttcccaaaacaggacgtgtttattgctcctggcaagggccaaactggccaccatcaccatcaccat

SEQ ID NO: 548 - protein, 369 aa, synthetic construct
  REGION 1..369: note = Variant of oxalate decarboxylase from Gemmata sp. SH-PL17
MGDPTFMNNVPDHLLSGKDLPTFKFELEKSKGKVIGKSSGKEATVVQLPISKGIAGVSMVLEPGAMRELHWHATAAEWGFVLTGHVRTTVIDPQGAAETNDFGPGDVWYFPRGHGHMLECLGDKPAHFILIFDNGYFSEFGTFSITDWIGHTPKALLAKNFGLPESAFDGFPKKEVYFARGAVPPATPAAPLQGLKLPPLTHKYELLEQEPHKVFKGGREWRVDSSRFPISKTVTGVVLDLEPGALRELHWHPNADEWQYVIDGNISVTMFGSHGRYRTEQMEKGDVGYIPQGYGHSIENVGDRPCRVLIGFNTGNYQAIDLSQWIAGNPADVLATNFSKPTSLFEKFPKQDVFIAPGKGQTGHHHHHH

SEQ ID NO: 549 - DNA, 1107 bp, synthetic construct
  misc_feature 1..1107: note = Variant of oxalate decarboxylase from Gemmata sp. SH-PL17
  source 1..1107: mol_type = other DNA
atgggtgatccgacctttatgaataatgtgccagaccctctgctgtcgggcaaagatttgccgacgttcaagtttgaactggaaaagagcaagggcaaagtcattgggaaaagttcgggaaaagaagcaaccgttgtccagttacctatctccaaaggcattgctggtgtgagcatggtgcttgaaccgggtgcgatgcgcgaattgcactggcatgccacagcagcagagtgggctttcgtattaaccggccacgtccgtacgacggtgatcgatccacaaggtgcggccgaaaccaacgactttggaccgggcgacgtgtggtattttcctcgcggtcatgggcacatgctggaatgcctgggcgataaaccggcgcatttcattctgatcttcgataacggctacttctcagagtttggcaccttctctattactgactggatcggtcacacaccgaaagcgcttctcgccaagaactttggtctgcccgaatcggcttttgatgggtttcccaaaaaagaggtctattttgcacgtggcgcggttccaccagccacccctgcagcgcctttacagggactgaagctgccaccactcacgcataaatacgaactcctcgaacaagaacctcataaagttttcaaaggtggtcgtgaatggcgcgtggatagctcgcgttttcccatttccaagactgtaaccggcgttgttcttgatttggaacccggcgcgttacgcgagcttcactggcatcctaatgctgacgagtggcaatatgtgatcgatggcaacattagtgtgacgatgttcggttctcatggccgttaccgcaccgaacagatggagaagggtgatgtcgggtatattccacaggggtatggccacagcatcgaaaatattggagatcgtccttgtcgcgtcttgattggctttaacacaggtaactaccaagcgatcgacttatcacagtggattgcaggtaatcccgcggatgttcttgccacgaacttctccaaacccaccagcctctttgaaaagttcccaaaacaggacgtgtttattgctcctggcaagggccaaactggccaccatcaccatcaccat

SEQ ID NO: 550 - protein, 369 aa, synthetic construct
  REGION 1..369: note = Variant of oxalate decarboxylase from Gemmata sp. SH-PL17
MGDPTFMNNVPDPLLSGKDLPTFKFELEKSKGKVIGKSSGKEATVVQLPISKGIAGVSMVLEPGAMRELHWHATAAEWAFVLTGHVRTTVIDPQGAAETNDFGPGDVWYFPRGHGHMLECLGDKPAHFILIFDNGYFSEFGTFSITDWIGHTPKALLAKNFGLPESAFDGFPKKEVYFARGAVPPATPAAPLQGLKLPPLTHKYELLEQEPHKVFKGGREWRVDSSRFPISKTVTGVVLDLEPGALRELHWHPNADEWQYVIDGNISVTMFGSHGRYRTEQMEKGDVGYIPQGYGHSIENIGDRPCRVLIGFNTGNYQAIDLSQWIAGNPADVLATNFSKPTSLFEKFPKQDVFIAPGKGQTGHHHHHH

SEQ ID NO: 551 - DNA, 1107 bp, synthetic construct
  misc_feature 1..1107: note = Variant of oxalate decarboxylase from Gemmata sp. SH-PL17
  source 1..1107: mol_type = other DNA
atgggtgatccgacctttatgaataatgtgccagaccctgtgctgtcgggcaaagatttgccgacgttcaagtttgaactggaaaagagcaagggcaaagtcattgggaaaagttcgggaaaagaagcaaccgttgtccagttacctatctccaaaggcattgctggtgtgagcatgacccttgaaccgggtgcgatgcgcgaattgcactggcatgccacagcagcagagtgggggttcgtattaaccggccacgtccgtacgacggtgatcgatccacaaggtgcggccgaaaccaacgactttggaccgggcgacgtgtggtattttcctcgcggtcatgggcacatgctggaatgcctgggcgataaaccggcgcatttcattctgatcttcgataacggctacttctcagagtttggcaccttctctattactgactggatcggtcacacaccgaaagcgcttctcgccaagaactttggtctgcccgaatcggcttttgatgggtttcccaaaaaagaggtctattttgcacgtggcgcggttccaccagccacccctgcagcgcctttacagggactgaagctgccaccactcacgcataaatacgaactcctcgaacaagaacctcacaaagtttttaaaggtggtcgtgaatggcgcgtggatagctcgcgttttcccatttccaagactgtaaccggcgttgttcttgatttggaacccggcgcgttacgcgagcttcactggcatcctaatgctgacgagtggcaatatgtgatcgatggcaacattagtgtgacgatgttcggttctcatggccgttaccgcaccgaacagatggagaagggtgatgtcgggtatattccacaggggtatggccacagcatcgaaaatgttggagatcgtccttgtcgcgtcttgattggctttaacacaggtaactaccaagcgatcgacttatcacagtggattgcaggtaatcccgcggatgttcttgccacgaacttctccaaacccaccagcctctttgaaaagttcccaaaacaggacgtgtttattgctcctggcaagggccaaactggccaccatcaccatcaccat

SEQ ID NO: 552 - protein, 369 aa, synthetic construct
  REGION 1..369: note = Variant of oxalate decarboxylase from Gemmata sp. SH-PL17
MGDPTFMNNVPDPVLSGKDLPTFKFELEKSKGKVIGKSSGKEATVVQLPISKGIAGVSMTLEPGAMRELHWHATAAEWGFVLTGHVRTTVIDPQGAAETNDFGPGDVWYFPRGHGHMLECLGDKPAHFILIFDNGYFSEFGTFSITDWIGHTPKALLAKNFGLPESAFDGFPKKEVYFARGAVPPATPAAPLQGLKLPPLTHKYELLEQEPHKVFKGGREWRVDSSRFPISKTVTGVVLDLEPGALRELHWHPNADEWQYVIDGNISVTMFGSHGRYRTEQMEKGDVGYIPQGYGHSIENVGDRPCRVLIGFNTGNYQAIDLSQWIAGNPADVLATNFSKPTSLFEKFPKQDVFIAPGKGQTGHHHHHH

SEQ ID NO: 553 - DNA, 1107 bp, synthetic construct
  misc_feature 1..1107: note = Variant of oxalate decarboxylase from Gemmata sp. SH-PL17
  source 1..1107: mol_type = other DNA
atgggtgatccgacctttatgaataatgtgccagaccctctgctgtcgggcaaagatttgccgacgttcaagtttgaactggaaaagagcaagggcaaagtcattgggaaaagttcgggaaaagaagcaaccgttgtccagttacctatctccaaaggcattgctggtgtgagcatggtgcttgaaccgggtgcgatgcgcgaattgcactggcatgccacagcagcagagtgggcgttcgtattagagggccacgtccgtacgacggtgatcgatccacaaggtgcggccgaaaccaacgactttggaccgggcgacgtgtggtattttcctcgcggtcatgggcacatgctggaatgcctgggcgataaaccggcgcatttcattctgatcttcgataacggctacttctcagagtttggcaccttctctattactgactggatcggtcacacaccgaaagcgcttctcgccaagaactttggtctgcccgaatcggcttttgatgggtttcccaaaaaagaggtctattttgcacgtggcgcggttccaccagccacccctgcagcgcctttacagggactgaagttgccaccactcacgcataaatacgaactcctcgaacaagaacctcataaagttttcaaaggtggtcgtgaatggcgcgtggatagctcgcgttttcccatttccaagactgtaaccggcgttgttcttgatttggaacccggcgcgttacgcgagcttcactggcatcctaatgctgacgagtggcaatatgtgatcgatggcaacattagtgtgacgatgttcggttctcatggccgttaccgcaccgaacagatggagaagggtgatgtcgggtatattccacaggggtatggccacagcatcgaaaatgttggagatcgtccttgtcgcgtcttgattggctttaacacaggtaactaccaagcgatcgacttatcacagtggattgcaggtaatcccgcggatgttcttgccacgaacttctccaaacccaccagcctctttgaaaagttcccaaaacaggacgtgtttattgctcctggcaagggccaaactggccaccatcaccatcaccat

SEQ ID NO: 554 - protein, 369 aa, synthetic construct
  REGION 1..369: note = Variant of oxalate decarboxylase from Gemmata sp. SH-PL17
MGDPTFMNNVPDPLLSGKDLPTFKFELEKSKGKVIGKSSGKEATVVQLPISKGIAGVSMVLEPGAMRELHWHATAAEWAFVLEGHVRTTVIDPQGAAETNDFGPGDVWYFPRGHGHMLECLGDKPAHFILIFDNGYFSEFGTFSITDWIGHTPKALLAKNFGLPESAFDGFPKKEVYFARGAVPPATPAAPLQGLKLPPLTHKYELLEQEPHKVFKGGREWRVDSSRFPISKTVTGVVLDLEPGALRELHWHPNADEWQYVIDGNISVTMFGSHGRYRTEQMEKGDVGYIPQGYGHSIENVGDRPCRVLIGFNTGNYQAIDLSQWIAGNPADVLATNFSKPTSLFEKFPKQDVFIAPGKGQTGHHHHHH

SEQ ID NO: 555 - DNA, 1107 bp, synthetic construct
  misc_feature 1..1107: note = Variant of oxalate decarboxylase from Gemmata sp. SH-PL17
  source 1..1107: mol_type = other DNA
atgggtgatccgacctttatgaataatgtgccagaccctctgctgtcgggcaaagatttgccgacgttcaagtttgaactggaaaagagcaagggcaaagtcattgggaaaagttcgggaaaagaagcaaccgttgtccagttacctatctccaaaggcattgctggtgtgagcatgacccttgaaccgggtgcgatgcgcgaattgcactggcatgccacagcagcagagtgggggttcgtattaaccggccacgtccgtacgacggtgatcgatccacaaggtgcggccgaaaccaacgactttggaccgggcgacgtgtggtattttcctcgcggtcatgggcacatgctggaatgcctgggcgataaaccggcgcatttcattctgatcttcgataacggctacttctcagagtttggcaccttctctattactgactggatcggtcacacaccgaaagcgcttctcgccaagaactttggtctgcccgaatcggcttttgatgggtttcccaaaaaagaggtctattttgcacgtggcgcggttccaccagccacccctgcagcgcctttacagggactgaagctgccaccactcacgcataaatacgaactcctcgaacaagaacctcataaagttttcaaaggtggtcgtgaatggcgcgtggatagctcgcgttttcccatttccaagactgtaaccggcgttgttcttgatttggaacccggcgcgttacgcgagcttcactggcatcctaatgctgacgagtggcaatatgtgatcgatggcaacattagtgtgacgatgttcggttctcatggccgttaccgcaccgaacagatggagaagggtgatgtcgggtatattccacaggggtatggccacagcatcgaaaatgttggagatcgtccttgtcgcgtcttgattggctttaacacaggtaactaccaagcgatcgacttatcacagtggattgcaggtaatcccgcggatgttcttgccacgaacttctccaaacccaccagcctctttgaaaagttcccaaaacaggacgtgtttattgctcctggcaagggccaaactggccaccatcaccatcaccat

SEQ ID NO: 556 - protein, 369 aa, synthetic construct
  REGION 1..369: note = Variant of oxalate decarboxylase from Gemmata sp. SH-PL17
MGDPTFMNNVPDPLLSGKDLPTFKFELEKSKGKVIGKSSGKEATVVQLPISKGIAGVSMTLEPGAMRELHWHATAAEWGFVLTGHVRTTVIDPQGAAETNDFGPGDVWYFPRGHGHMLECLGDKPAHFILIFDNGYFSEFGTFSITDWIGHTPKALLAKNFGLPESAFDGFPKKEVYFARGAVPPATPAAPLQGLKLPPLTHKYELLEQEPHKVFKGGREWRVDSSRFPISKTVTGVVLDLEPGALRELHWHPNADEWQYVIDGNISVTMFGSHGRYRTEQMEKGDVGYIPQGYGHSIENVGDRPCRVLIGFNTGNYQAIDLSQWIAGNPADVLATNFSKPTSLFEKFPKQDVFIAPGKGQTGHHHHHH

SEQ ID NO: 557 - DNA, 1107 bp, synthetic construct
  misc_feature 1..1107: note = Variant of oxalate decarboxylase from Gemmata sp. SH-PL17
  source 1..1107: mol_type = other DNA
atgggtgatccgacctttatgaataatgtgccagaccatctgctgtcgggcaaagatttgccgacgttcaagtttgaactggaaaagagcaagggcaaagtcattgggaaaagttcgggaaaagaagcaaccgttgtccagttacctatctccaaaggcattgctggtgtgagcatggtgcttgaaccgggtgcgatgcgcgaattgcactggcatgccacagcagcagagtgggggttcgtattagagggccacgtccgtacgacggtgatcgatccacaaggtgcggccgaaaccaacgactttggaccgggcgacgtgtggtattttcctcgcggtcatgggcacatgctggaatgcctgggcgataaaccggcgcatttcattctgatcttcgataacggctacttctcagagtttggcaccttctctattactgactggatcggtcacacaccgaaagcgcttctcgccaagaactttggtctgcccgaatcggcttttgatgggtttcccaaaaaagaggtctattttgcacgtggcgcggttccaccagccacccctgcagcgcctttacagggactgaagctgccaccactcacgcataaatacgaactcctcgaacaagaacctcacaaagtttttaaaggtggtcgtgaatggcgcgtggatagctcgcgttttcccatttccaagactgtaaccggcgttgttcttgatttggaacccggcgcgttacgcgagcttcactggcatcctaatgctgacgagtggcaatatgtgatcgatggcaacattagtgtgacgatgttcggttctcatggccgttaccgcaccgaacagatggagaagggtgatgtcgggtatattccacaggggtatggccacagcatcgaaaatattggagatcgtccttgtcgcgtcttgattggctttaacacaggtaactaccaagcgatcgacttatcacagtggattgcaggtaatcccgcggatgttcttgccacgaacttctccaaacccaccagcctctttgaaaagttcccaaaacaggacgtgtttattgctcctggcaagggccaaactggccaccatcaccatcaccat

SEQ ID NO: 558 - protein, 369 aa, synthetic construct
  REGION 1..369: note = Variant of oxalate decarboxylase from Gemmata sp. SH-PL17
MGDPTFMNNVPDHLLSGKDLPTFKFELEKSKGKVIGKSSGKEATVVQLPISKGIAGVSMVLEPGAMRELHWHATAAEWGFVLEGHVRTTVIDPQGAAETNDFGPGDVWYFPRGHGHMLECLGDKPAHFILIFDNGYFSEFGTFSITDWIGHTPKALLAKNFGLPESAFDGFPKKEVYFARGAVPPATPAAPLQGLKLPPLTHKYELLEQEPHKVFKGGREWRVDSSRFPISKTVTGVVLDLEPGALRELHWHPNADEWQYVIDGNISVTMFGSHGRYRTEQMEKGDVGYIPQGYGHSIENIGDRPCRVLIGFNTGNYQAIDLSQWIAGNPADVLATNFSKPTSLFEKFPKQDVFIAPGKGQTGHHHHHH

SEQ ID NO: 559 - DNA, 1107 bp, synthetic construct
  misc_feature 1..1107: note = Variant of oxalate decarboxylase from Gemmata sp. SH-PL17
  source 1..1107: mol_type = other DNA
atgggtgatccgacctttatgaataatgtgccagaccctctgctgtcgcataaagatttgccgacgttcaagtttgaactggaaaagagcaagggcaaagtcattgggaaaagttcgggaaaagaagcaaccgttgtccagttacctatctccaagggcattgctggtgtgagcatgacccttgaaccgggtgcgatgcgcgaattgcactggcatgctacagcagcagagtgggctttcgtattaaccggccacgtccgtacgacggtgatcgatccacaaggtgcggccgaaaccaacgactttggaccgggcgacgtgtggtattttcctcgcggtcatgggcacatgctggaatgcctgggcgataaaccggcgcatttcattctgatcttcgataacggctacttctcagagtttggcaccttctctattactgactggatcggtcacacaccgaaagcgcttctcgccaagaactttggtctgcccgaatcggcttttgatgggtttcccaaaaaagaggtctattttgcacgtggcgcggttccaccagccacccctgcagcgcctttacagggactgaagttgccaccactcacgcataaatacgaactcctcgagcaagaacctcataaagttttcaaaggtggtcgtgaatggcgcgtggatagctcgcgttttcccatttccaagactgtaaccggcgttgttcttgatttggaacccggcgcgttacgcgagcttcactggcatcctaatgctgacgagtggcaatatgtgatcgatggcaacattagtgtgacgatgttcggttctcatggccgttaccgcaccgaacagatggagaagggtgatgtcgggtatattccacaggggtatggccacagcatcgaaaatgtgggagatcgtccttgtcgcgtcttgattggctttaacacaggtaactaccaagcgatcgacttatcacagtggattgcaggtaatcccgcggatgttcttgccacgaacttctccaaaccccctagcctctttgaaaagttcccaaaacaagacgtgtttattgctcctggcaagggccaaactggccaccatcaccatcaccat

SEQ ID NO: 560 - protein, 369 aa, synthetic construct
  REGION 1..369: note = Variant of oxalate decarboxylase from Gemmata sp. SH-PL17
MGDPTFMNNVPDPLLSHKDLPTFKFELEKSKGKVIGKSSGKEATVVQLPISKGIAGVSMTLEPGAMRELHWHATAAEWAFVLTGHVRTTVIDPQGAAETNDFGPGDVWYFPRGHGHMLECLGDKPAHFILIFDNGYFSEFGTFSITDWIGHTPKALLAKNFGLPESAFDGFPKKEVYFARGAVPPATPAAPLQGLKLPPLTHKYELLEQEPHKVFKGGREWRVDSSRFPISKTVTGVVLDLEPGALRELHWHPNADEWQYVIDGNISVTMFGSHGRYRTEQMEKGDVGYIPQGYGHSIENVGDRPCRVLIGFNTGNYQAIDLSQWIAGNPADVLATNFSKPPSLFEKFPKQDVFIAPGKGQTGHHHHHH

SEQ ID NO: 561 - DNA, 1107 bp, synthetic construct
  misc_feature 1..1107: note = Variant of oxalate decarboxylase from Gemmata sp. SH-PL17
  source 1..1107: mol_type = other DNA
atgggtgatccgacctttatgaataatgtgccagaccctctgctgtcgcataaagatttgccgacgttcaagtttgaactggaaaagagcaagggcaaagtcattgggaaaagttcgggaaaagaagcaaccgttgtccagttacctatctccacgggcattgctggtgtgagcatgacccttgaaccgggtgcgatgcgcgaattgcactggcatgctacagcagcagagtgggctttcgtattaaccggccacgtccgtacgacggtgatcgatccacagggtgcggccgaaaccaacgactttggaccgggcgacgtgtggtattttcctcgcggtcatgggcacatgctggaatgcctgggcgataaaccggcgcatttcattctgatcttcgataacggctacttctcagagtttggcaccttctctattactgactggatcggtcacacaccgaaagcgcttctcgccaagaactttggtctgcccgaatcggcttttgatgggtttcccaaaaaagaggtctattttgcacgtggcgcggttccaccagccacccctgcacagcctttacagggactgaagttgccaccactcacgcataaatacgaactcctcgagcaagaacctcataaagttttcaaaggtggtcgtgaatggcgcgtggatagctcgcgttttcccatttccaagactgtaaccggcgttgttcttgatttggaacccggcgcgttacgcgagcttcactggcatcctaatgctgacgagtggcaatatgtgatcgatggcaacattagtgtgacgatgttcggttctcatggccgttaccgcaccgaacagatggagaagggtgatgtcgggtatattccacaggggtatggccacagcatcgaaaatgtgggagatcgtccttgtcgtgtcttgattggctttaacacaggtaactaccaagcgatcgacttatcacagtggattgcaggtaatcccgcggatgttcttgccacgaacttctccaaacccaccagcctctttgaaaagttcccaaaacaggacgtgtttattgctcctggcaagggccaaactggccaccatcaccatcaccat

SEQ ID NO: 562 - protein, 369 aa, synthetic construct
  REGION 1..369: note = Variant of oxalate decarboxylase from Gemmata sp. SH-PL17
MGDPTFMNNVPDPLLSHKDLPTFKFELEKSKGKVIGKSSGKEATVVQLPISTGIAGVSMTLEPGAMRELHWHATAAEWAFVLTGHVRTTVIDPQGAAETNDFGPGDVWYFPRGHGHMLECLGDKPAHFILIFDNGYFSEFGTFSITDWIGHTPKALLAKNFGLPESAFDGFPKKEVYFARGAVPPATPAQPLQGLKLPPLTHKYELLEQEPHKVFKGGREWRVDSSRFPISKTVTGVVLDLEPGALRELHWHPNADEWQYVIDGNISVTMFGSHGRYRTEQMEKGDVGYIPQGYGHSIENVGDRPCRVLIGFNTGNYQAIDLSQWIAGNPADVLATNFSKPTSLFEKFPKQDVFIAPGKGQTGHHHHHH

SEQ ID NO: 563 - DNA, 1107 bp, synthetic construct
  misc_feature 1..1107: note = Variant of oxalate decarboxylase from Gemmata sp. SH-PL17
  source 1..1107: mol_type = other DNA
atgggtgatccgacctttatgaataatgtgccagaccctctgctgtcgcataaagatttgccgacgttcaagtttgaactggaaaagagcaagggcaaagtcattgggaaaagttcgggaaaagaagcaaccgttgtccagttacctatctccaagggcattgctggtgtgagcatgacccttgaaccgggtgcgatgcgcgaattgcactggcatgctacagcagcagagtgggctttcgtattaaccggccacgtccgtacgacggtgatcgatccaaacggtgcggccgaaaccaacgactttggaccgggcgacgtgtggtattttcctcgcggtcatgggcacatgctggaatgcctgggcgataaaccggcgcatttcattctgatcttcgataacggctacttctcagagtttggcaccttctctattactgactggatcggtcacacaccgaaagcgcttctcgccaagaactttggtctgcccgaatcggcttttgatgggtttcccaaaaaagaggtctattttgcacgtggcgcggttccaccagccacccctgcacagcctttacagggactgaagttgccaccactcacgcataaatacgaactcctcgagcaagaacctcataaagttttcaaaggtggtcgtgaatggcgcgtggatagctcgcgttttcccatttccaagactgtaaccggcgttgttcttgatttggaacccggcgcgttacgcgagcttcactggcatcctaatgctgacgagtggcaatatgtgatcgatggcaacattagtgtgacgatgttcggttctcatggccgttaccgcaccgaacagatggagaagggtgatgtcgggtatattccacaggggtatggccacagcatcgaaaatgtgggagatcgtccttgtcgtgtcttgattggctttaacacaggtaactaccaagcgatcgacttatcacagtggattgcaggtaatcccgcggatgttcttgccacgaacttctccaaacccaccagcctctttgaaaagttcccaaaacaggacgtgtttattgctcctggcaagggccaaactggccaccatcaccatcaccat

SEQ ID NO: 564 - protein, 369 aa, synthetic construct
  REGION 1..369: note = Variant of oxalate decarboxylase from Gemmata sp. SH-PL17
MGDPTFMNNVPDPLLSHKDLPTFKFELEKSKGKVIGKSSGKEATVVQLPISKGIAGVSMTLEPGAMRELHWHATAAEWAFVLTGHVRTTVIDPNGAAETNDFGPGDVWYFPRGHGHMLECLGDKPAHFILIFDNGYFSEFGTFSITDWIGHTPKALLAKNFGLPESAFDGFPKKEVYFARGAVPPATPAQPLQGLKLPPLTHKYELLEQEPHKVFKGGREWRVDSSRFPISKTVTGVVLDLEPGALRELHWHPNADEWQYVIDGNISVTMFGSHGRYRTEQMEKGDVGYIPQGYGHSIENVGDRPCRVLIGFNTGNYQAIDLSQWIAGNPADVLATNFSKPTSLFEKFPKQDVFIAPGKGQTGHHHHHH

SEQ ID NO: 565 - DNA, 1107 bp, synthetic construct
  misc_feature 1..1107: note = Variant of oxalate decarboxylase from Gemmata sp. SH-PL17
  source 1..1107: mol_type = other DNA
atgggtgatccgacctttatgaataatgtgccagaccctctgctgtcgcataaagatttgccgacgttcaagtttgaactggaaaagagcaagggcaaagtcattgggaaaagttcgggaaaagaagcaaccgttgtccagttacctatctccaagggcattgctggtgtgagcatgacccttgaaccgggtgcgatgcgcgaattgcactggcatgctacagcagcagagtgggctttcgtattaaccggccacgtccgtacgacggtgatcgatccacagggtgcggccgaaaccaacgactttggaccgggcgacgtgtggtattttcctcgcggtcatgggcacatgctggaatgcctgggcgataaaccggcgcatttcattctgatcttcgataacggctacttctcagagtttggcaccttctctattactgactggatcggtcacacaccgaaagcgcttctcgccaagaactttggtctgcccgaatcggcttttgatgggtttcccaaaaaagaggtctattttgcacgtggcgcggttccaccagccacccctgcacagcctttacagggactgaagttgccaccactcacgcataaatacgaactcctcgagcaagaacctcataaagttttcaaaggtggtcgtgaatggcgcgtggatagctcgcgttttcccatttccaagactgtaaccggcgttgttcttgatttggaacccggcgcgttacgcgagcttcactggcatcctaatgctgacgagtggcaatatgtgatcgatggcaacattagtgtgacgatgttcggttctcatggccgttaccgcaccgaacagatggagaagggtgatgtcgggtatattccacaggggtatggccacagcatcgaaaatgtgggagatcgtccttgtcgtgtcttgattggctttaacacaggtaactaccaagcgatcgacttatcacagtggattgcaggtaatcccgcggatgttcttgccacgaacttctccaaaccccctagcctctttgaaaagttcccaaaagaagacgtgtttattgctcctggcaagggccaaactggccaccatcaccatcaccat

SEQ ID NO: 566 - protein, 369 aa, synthetic construct
  REGION 1..369: note = Variant of oxalate decarboxylase from Gemmata sp. SH-PL17
MGDPTFMNNVPDPLLSHKDLPTFKFELEKSKGKVIGKSSGKEATVVQLPISKGIAGVSMTLEPGAMRELHWHATAAEWAFVLTGHVRTTVIDPQGAAETNDFGPGDVWYFPRGHGHMLECLGDKPAHFILIFDNGYFSEFGTFSITDWIGHTPKALLAKNFGLPESAFDGFPKKEVYFARGAVPPATPAQPLQGLKLPPLTHKYELLEQEPHKVFKGGREWRVDSSRFPISKTVTGVVLDLEPGALRELHWHPNADEWQYVIDGNISVTMFGSHGRYRTEQMEKGDVGYIPQGYGHSIENVGDRPCRVLIGFNTGNYQAIDLSQWIAGNPADVLATNFSKPPSLFEKFPKEDVFIAPGKGQTGHHHHHH

SEQ ID NO: 567 - DNA, 1107 bp, synthetic construct
  misc_feature 1..1107: note = Variant of oxalate decarboxylase from Gemmata sp. SH-PL17
  source 1..1107: mol_type = other DNA
atgggtgatccgacctttatgaataatgtgccagaccatctgctgtcgcataaagatttgccgacgttcaagtttgaactggaaaagagcaagggcaaagtcattgggaaaagttcgggaaaagaagcaaccgttgtccagttacctatctccaaaggcattgctggtgtgagcatgacccttgaaccgggtgcgatgcgcgaattgcactggcatgccacagcagcagagtggggtttcgtattaaccggccacgtccgtacgacggtgatcgatccacaaggtgcggccgaaaccaacgactttggaccgggcgacgtgtggtattttcctcgcggtcatgggcacatgctggaatgcctgggcgataaaccggcgcatttcattctgatcttcgataacggctacttctcagagtttggcaccttctctattactgactggatcggtcacacaccgaaagcgcttctcgccaagaactttggtctgcccgaatcggcttttgatgggtttcccaaaaaagaggtctattttgcacgtggcgcggttccaccagccacccctgcagcgcctttacagggactgaagttgccaccactcacgcataaatacgaactcctcgaacaagaacctcataaagttttcaaaggtggtcgtgaatggcgcgtggatagctcgcgttttcccatttccaagactgtaaccggcgttgttcttgatttggaacccggcgcgttacgcgagcttcactggcatcctaatgctgacgagtggcaatatgtgatcgatggcaacattagtgtgacgatgttcggttctcatggccgttaccgcaccgaacagatggagaagggtgatgtcgggtatattccacaggggtatggccacagcatcgaaaatgtgggagatcgtccttgtcgcgtcttgattggctttaacacaggtaactaccaagcgatcgacttatcacagtggattgcaggtaatcccgcggatgttcttgccacgaacttctccaaacccaccagcctctttgaaaagttcccaaaacaggacgtgtttattgctcctggcaagggccaaactggccaccatcaccatcaccat

SEQ ID NO: 568 - protein, 369 aa, synthetic construct
  REGION 1..369: note = Variant of oxalate decarboxylase from Gemmata sp. SH-PL17
MGDPTFMNNVPDHLLSHKDLPTFKFELEKSKGKVIGKSSGKEATVVQLPISKGIAGVSMTLEPGAMRELHWHATAAEWGFVLTGHVRTTVIDPQGAAETNDFGPGDVWYFPRGHGHMLECLGDKPAHFILIFDNGYFSEFGTFSITDWIGHTPKALLAKNFGLPESAFDGFPKKEVYFARGAVPPATPAAPLQGLKLPPLTHKYELLEQEPHKVFKGGREWRVDSSRFPISKTVTGVVLDLEPGALRELHWHPNADEWQYVIDGNISVTMFGSHGRYRTEQMEKGDVGYIPQGYGHSIENVGDRPCRVLIGFNTGNYQAIDLSQWIAGNPADVLATNFSKPTSLFEKFPKQDVFIAPGKGQTGHHHHHH

SEQ ID NO: 569 - DNA, 1107 bp, synthetic construct
  misc_feature 1..1107: note = Variant of oxalate decarboxylase from Gemmata sp. SH-PL17
  source 1..1107: mol_type = other DNA
atgggtgatccgacctttatgaataatgtgccagaccatctgctgtcgcataaagatttgccgacgttcaagtttgaactggaaaagagcaagggcaaagtcattgggaaaagttcgggaaaagaagcaaccgttgtccagttacctatctccaaaggcattgctggtgtgagcatgacccttgaaccgggtgcgatgcgcgaattgcactggcatgccacagcagcagagtgggctttcgtattaaccggccacgtccgtacgacggtgatcgatccacaaggtctggccgaaaccaacgactttggaccgggcgacgtgtggtattttcctcgcggtcatgggcacatgctggaatgcctgggcgataaaccggcgcatttcattctgatcttcgataacggctacttctcagagtttggcaccttctctattactgactggatcggtcacacaccgaaagcgcttctcgccaagaactttggtctgcccgaatcggcttttgatgggtttcccaaaaaagaggtctattttgcacgtggcgcggttccaccagccacccctgcagcgcctttacagggactgaagttgccaccactcacgcataaatacgaactcctcgaacaagaacctcataaagttttcaaaggtggtcgtgaatggcgcgtggatagctcgcgttttcccatttccaagactgtaaccggcgttgttcttgatttggaacccggcgcgttacgcgagcttcactggcatcctaatgctgacgagtggcaatatgtgatcgatggcaacattagtgtgacgatgttcggttctcatggccgttaccgcaccgaacagatggagaagggtgatgtcgggtatattccacaggggtatggccacagcatcgaaaatgtgggagatcgtccttgtcgcgtcttgattggctttaacacaggtaactaccaagcgatcgacttatcacagtggattgcaggtaatcccgcggatgttcttgccacgaacttctccaaacccaccagcctctttgaaaagttcccaaaacaggacgtgtttattgctcctggcaagggccaaactggccaccatcaccatcaccat

SEQ ID NO: 570 - protein, 369 aa, synthetic construct
  REGION 1..369: note = Variant of oxalate decarboxylase from Gemmata sp. SH-PL17
MGDPTFMNNVPDHLLSHKDLPTFKFELEKSKGKVIGKSSGKEATVVQLPISKGIAGVSMTLEPGAMRELHWHATAAEWAFVLTGHVRTTVIDPQGLAETNDFGPGDVWYFPRGHGHMLECLGDKPAHFILIFDNGYFSEFGTFSITDWIGHTPKALLAKNFGLPESAFDGFPKKEVYFARGAVPPATPAAPLQGLKLPPLTHKYELLEQEPHKVFKGGREWRVDSSRFPISKTVTGVVLDLEPGALRELHWHPNADEWQYVIDGNISVTMFGSHGRYRTEQMEKGDVGYIPQGYGHSIENVGDRPCRVLIGFNTGNYQAIDLSQWIAGNPADVLATNFSKPTSLFEKFPKQDVFIAPGKGQTGHHHHHH

SEQ ID NO: 571 - DNA, 1107 bp, synthetic construct
  misc_feature 1..1107: note = Variant of oxalate decarboxylase from Gemmata sp. SH-PL17
  source 1..1107: mol_type = other DNA
atgggtgatccgacctttatgaataatgtgccagaccctctgctgtcgcataaagatttgccgacgttcaagtttgaactggaaaagagcaagggcaaagtcattgggaaaagttcgggaaaagaagcaaccgttgtccagttacctatctccaaaggcattgctggtgtgagcatgacccttgaaccgggtgcgatgcgcgaattgcactggcatgccacagcagcagagtgggctttcgtattaaccggccacgtccgtacgacggtgatcgatccacaaggtgcggccgaaaccaacgactttggaccgggcgacgtgtggtattttcctcgcggtcatgggcacatgctggaatgcctgggcgataaaccggcgcatttcattctgatcttcgataacggctacttctcagagtttggcaccttctctattactgactggatcggtcacacaccgaaagcgcttctcgccaagaactttggtctgcccgaatcggcttttgatgggtttcccaaaaaagaggtctattttgcacgtggcgcggttccaccagccacccctgcagcgcctttacagggactgaagttgccaccactcacgcataaatacgaactcctcgaacaagaacctcataaagttttcaaaggtggtcgtgaatggcgcgtggatagctcgcgttttcccatttccaagactgtaaccggcgttgttcttgatttggaacccggcgcgttacgcgagcttcactggcatcctaatgctgacgagtggcaatatgtgatcgatggcaacattagtgtgacgatgttcggtgcgcatggccgttaccgcaccgaacagatggagaagggtgatgtcgggtatattccacaggggtatggccacagcatcgaaaatgtgggagatcgtccttgtcgcgtcttgattggctttaacacaggtaactaccaagcgatcgacttatcacagtggattgcaggtaatcccgcggatgttcttgccacgaacttctccaaacccaccagcctctttgaaaagttcccaaaacaggacgtgtttattgctcctggcaagggccaaactggccaccatcaccatcaccat

SEQ ID NO: 572 - protein, 369 aa, synthetic construct
  REGION 1..369: note = Variant of oxalate decarboxylase from Gemmata sp. SH-PL17
MGDPTFMNNVPDPLLSHKDLPTFKFELEKSKGKVIGKSSGKEATVVQLPISKGIAGVSMTLEPGAMRELHWHATAAEWAFVLTGHVRTTVIDPQGAAETNDFGPGDVWYFPRGHGHMLECLGDKPAHFILIFDNGYFSEFGTFSITDWIGHTPKALLAKNFGLPESAFDGFPKKEVYFARGAVPPATPAAPLQGLKLPPLTHKYELLEQEPHKVFKGGREWRVDSSRFPISKTVTGVVLDLEPGALRELHWHPNADEWQYVIDGNISVTMFGAHGRYRTEQMEKGDVGYIPQGYGHSIENVGDRPCRVLIGFNTGNYQAIDLSQWIAGNPADVLATNFSKPTSLFEKFPKQDVFIAPGKGQTGHHHHHH

SEQ ID NO: 573 - DNA, 1107 bp, synthetic construct
  misc_feature 1..1107: note = Variant of oxalate decarboxylase from Gemmata sp. SH-PL17
  source 1..1107: mol_type = other DNA
atgggtgatccgacctttatgaataatgtgccagaccctctgctgtcgcataaagatttgccgacgttcaagtttgaactggaaaagagcaagggcaaagtcattgggaaaagttcgggaaaagaagcaaccgttgtccagttacctatctccaaaggcattgctggtgtgagcatgacccttgaaccgggtgcgatgcgcgaattgcactggcatgccacagcagcagagtgggctttcgtattaaccggccacgtccgtacgacggtgatcgatccacaaggtgcggccgaaaccaacgactttggaccgggcgacgtgtggtattttcctcgcggtcatgggcacatgctggaatgcctgggcgataaaccgactcatttcattctgatcttcgataacggctacttctcagagtttggcaccttctctattactgactggatcggtcacacaccgaaagcgcttctcgccaagaactttggtctgcccgaatcggcttttgatgggtttcccaaaaaagaggtctattttgcacgtggcgcggttccaccagccacccctgcagcgcctttacagggactgaagttgccaccactcacgcataaatacgaactcctcgaacaagaacctcataaagttttcaaaggtggtcgtgaatggcgcgtggatagctcgcgttttcccatttccaagactgtaaccggcgttgttcttgatttggaacccggcgcgttacgcgagcttcactggcatcctaatgctgacgagtggcaatatgtgatcgatggcaacattagtgtgacgatgttcggttctcatggccgttaccgcaccgaacagatggagaagggtgatgtcgggtatattccacaggggtatggccacagcatcgaaaatgtgggagatcgtccttgtcgcgtcttgattggctttaacacaggtaactaccaagcgatcgacttatcacagtggattgcaggtaatcccgcggatgttcttgccacgaacttctccaaacccaccagcctctttgaaaagttcccaaaacaggacgtgtttattgctcctggcaagggccaaactggccaccatcaccatcaccat

SEQ ID NO: 574 - protein, 369 aa, synthetic construct
  REGION 1..369: note = Variant of oxalate decarboxylase from Gemmata sp. SH-PL17
MGDPTFMNNVPDPLLSHKDLPTFKFELEKSKGKVIGKSSGKEATVVQLPISKGIAGVSMTLEPGAMRELHWHATAAEWAFVLTGHVRTTVIDPQGAAETNDFGPGDVWYFPRGHGHMLECLGDKPTHFILIFDNGYFSEFGTFSITDWIGHTPKALLAKNFGLPESAFDGFPKKEVYFARGAVPPATPAAPLQGLKLPPLTHKYELLEQEPHKVFKGGREWRVDSSRFPISKTVTGVVLDLEPGALRELHWHPNADEWQYVIDGNISVTMFGSHGRYRTEQMEKGDVGYIPQGYGHSIENVGDRPCRVLIGFNTGNYQAIDLSQWIAGNPADVLATNFSKPTSLFEKFPKQDVFIAPGKGQTGHHHHHH

SEQ ID NO: 575 - DNA, 1107 bp, synthetic construct
  misc_feature 1..1107: note = Variant of oxalate decarboxylase from Gemmata sp. SH-PL17
  source 1..1107: mol_type = other DNA
atgggtgatccgacctttatgaataatgtgccagaccctctgctgtcgcataaagatttgccgacgttcaagtttgaactggaaaagagcaagggcaaagtcattgggaaaagttcgggaaaagaagcaaccgttgtccagttacctatctccaaaggcattgctggtgtgagcatgacccttgaaccgggtgcgatgcgcgaattgcactggcatgccacagcagcagagtgggctttcgtattaaccggccacgtccgtacgacggtgatcgatccacaaggtaaggccgaaaccaacgactttggaccgggcgacgtgtggtattttcctcgcggtcatgggcacatgctggaatgcctgggcgataaaccggcgcatttcattctgatcttcgataacggctacttctcagagtttggcaccttctctattactgactggatcggtcacacaccgaaagcgcttctcgccaagaactttggtctgcccgaatcggcttttgatgggtttcccaaaaaagaggtctattttgcacgtggcgcggttccaccagccacccctgcagcgcctttacagggactgaagttgccaccactcacgcataaatacgaactcctcgaacaagaacctcataaagttttcaaaggtggtcgtgaatggcgcgtggatagctcgcgttttcccatttccaagactgtaaccggcgttgttcttgatttggaacccggcgcgttacgcgagcttcactggcatcctaatgctgacgagtggcaatatgtgatcgatggcaacattagtgtgacgatgttcggttctcatggccgttaccgcaccgaacagatggagaagggtgatgtcgggtatattccacaggggtatggccacagcatcgaaaatgtgggagatcgtccttgtcgcgtcttgattggctttaacacaggtaactaccaagcgatcgacttatcacagtggattgcaggtaatcccgcggatgttcttgccacgaacttctccaaacccaccagcctctttgaaaagttcccaaaacaggacgtgtttattgctcctggcaagggccaaactggccaccatcaccatcaccat

SEQ ID NO: 576 - protein, 369 aa, synthetic construct
  REGION 1..369: note = Variant of oxalate decarboxylase from Gemmata sp. SH-PL17
MGDPTFMNNVPDPLLSHKDLPTFKFELEKSKGKVIGKSSGKEATVVQLPISKGIAGVSMTLEPGAMRELHWHATAAEWAFVLTGHVRTTVIDPQGKAETNDFGPGDVWYFPRGHGHMLECLGDKPAHFILIFDNGYFSEFGTFSITDWIGHTPKALLAKNFGLPESAFDGFPKKEVYFARGAVPPATPAAPLQGLKLPPLTHKYELLEQEPHKVFKGGREWRVDSSRFPISKTVTGVVLDLEPGALRELHWHPNADEWQYVIDGNISVTMFGSHGRYRTEQMEKGDVGYIPQGYGHSIENVGDRPCRVLIGFNTGNYQAIDLSQWIAGNPADVLATNFSKPTSLFEKFPKQDVFIAPGKGQTGHHHHHH

SEQ ID NO: 577 - DNA, 1107 bp, synthetic construct
  misc_feature 1..1107: note = Variant of oxalate decarboxylase from Gemmata sp. SH-PL17
  source 1..1107: mol_type = other DNA
atgggtgatccgacctttatgaataatgtgccagaccctctgctgtcgcataaagatttgccgacgttcaagtttgaactggaaaagagcaagggcaaagtcattgggaaaagttcgggaaaagaagcaaccgttgtccagttacctatctccaaaggcattgctggtgtgagcatgacccttgaaccgggtgcgatgcgcgaattgcactggcatgccacagcagcagagtggtcgttcgtattaaccggccacgtccgtacgacggtgatcgatccacaaggtgcggccgaaaccaacgactttggaccgggcgacgtgtggtattttcctcgcggtcatgggcacatgctggaatgcctgggcgataaaccggcgcatttcattctgatcttcgataacggctacttctcagagtttggcaccttctctattactgactggatcggtcacacaccgaaagcgcttctcgccaagaactttggtctgcccgaatcggcttttgatgggtttcccaaaaaagaggtctattttgcacgtggcgcggttccaccagccacccctgcagcgcctttacagggactgaagttgccaccactcacgcataaatacgaactcctcgaacaagaacctcataaagttttcaaaggtggtcgtgaatggcgcgtggatagctcgcgttttcccatttccaagactgtaaccggcgttgttcttgatttggaacccggcgcgttacgcgagcttcactggcatcctaatgctgacgagtggcaatatgtgatcgatggcaacattagtgtgacgatgttcggttctcatggccgttaccgcaccgaacagatggagaagggtgatgtcgggtatattccacaggggtatggccacagcatcgaaaatgtgggagatcgtccttgtcgcgtcttgattggctttaacacaggtaactaccaagcgatcgacttatcacagtggattgcaggtaatcccgcggatgttcttgccacgaacttctccaaacccaccagcctctttgaaaagttcccaaaacaggacgtgtttattgctcctggcaagggccaaactggccaccatcaccatcaccat

SEQ ID NO: 578 - protein, 369 aa, synthetic construct
  REGION 1..369: note = Variant of oxalate decarboxylase from Gemmata sp. SH-PL17
MGDPTFMNNVPDPLLSHKDLPTFKFELEKSKGKVIGKSSGKEATVVQLPISKGIAGVSMTLEPGAMRELHWHATAAEWSFVLTGHVRTTVIDPQGAAETNDFGPGDVWYFPRGHGHMLECLGDKPAHFILIFDNGYFSEFGTFSITDWIGHTPKALLAKNFGLPESAFDGFPKKEVYFARGAVPPATPAAPLQGLKLPPLTHKYELLEQEPHKVFKGGREWRVDSSRFPISKTVTGVVLDLEPGALRELHWHPNADEWQYVIDGNISVTMFGSHGRYRTEQMEKGDVGYIPQGYGHSIENVGDRPCRVLIGFNTGNYQAIDLSQWIAGNPADVLATNFSKPTSLFEKFPKQDVFIAPGKGQTGHHHHHH

SEQ ID NO: 579 - DNA, 1107 bp, synthetic construct
  misc_feature 1..1107: note = Variant of oxalate decarboxylase from Gemmata sp. SH-PL17
  source 1..1107: mol_type = other DNA
atgggtgatccgacctttatgaataatgtgccagaccctctgctgtcgcataaagatttgccgacgttcaagtttgaactggaaaagagcaagggcaaagtcattgggaaaagttcgggaaaagaagcaaccgttgtccagttacctatctccaaaggcattgctggtgtgagcatgacccttgaaccgggtgcgatgcgcgaattgcactggcatgccacagcagcagagtgggctttcgtattaaccggccacgtccgtacgacggtgatcgatccacaaggtgcggccgaaaccaacgactttggaccgggcgacgtgtggtattttcctcgcggtcatgggcacatgctggaatgcctgggcgataaaccggcgcatttcattctgatcttcgataacggctacttctcagagtttggcaccttctctattactgactggatcggtcacacaccgaaagcgcttctcgccaagaactttggtctgcccgaatcggcttttgatgggtttcccaaaaaagaggtctattttgcacgtggcgcggttccaccagccacccctgcagcgcctttacagggactgaagttgccaccactcacgcataaatacgaactcctcgaacaagaacctcataaagttttcaaaggtggtcgtgaatggcgcgtggatagctcgcgttttcccatttccaagactgtaaccggcgttgttcttgatttggaacccggcgcgttacgcgagcttcactggcatcctaatgctgacgagtggcaatatgtgatcgatggcaacattagtgtgagtatgttcggttctcatggccgttaccgcaccgaacagatggagaagggtgatgtcgggtatattccacaggggtatggccacagcatcgaaaatgtgggagatcgtccttgtcgcgtcttgattggctttaacacaggtaactaccaagcgatcgacttatcacagtggattgcaggtaatcccgcggatgttcttgccacgaacttctccaaacccaccagcctctttgaaaagttcccaaaacaggacgtgtttattgctcctggcaagggccaaactggccaccatcaccatcaccat

SEQ ID NO: 580 - protein, 369 aa, synthetic construct
  REGION 1..369: note = Variant of oxalate decarboxylase from Gemmata sp. SH-PL17
MGDPTFMNNVPDPLLSHKDLPTFKFELEKSKGKVIGKSSGKEATVVQLPISKGIAGVSMTLEPGAMRELHWHATAAEWAFVLTGHVRTTVIDPQGAAETNDFGPGDVWYFPRGHGHMLECLGDKPAHFILIFDNGYFSEFGTFSITDWIGHTPKALLAKNFGLPESAFDGFPKKEVYFARGAVPPATPAAPLQGLKLPPLTHKYELLEQEPHKVFKGGREWRVDSSRFPISKTVTGVVLDLEPGALRELHWHPNADEWQYVIDGNISVSMFGSHGRYRTEQMEKGDVGYIPQGYGHSIENVGDRPCRVLIGFNTGNYQAIDLSQWIAGNPADVLATNFSKPTSLFEKFPKQDVFIAPGKGQTGHHHHHH

SEQ ID NO: 581 - DNA, 1107 bp, synthetic construct
  misc_feature 1..1107: note = Variant of oxalate decarboxylase from Gemmata sp. SH-PL17
  source 1..1107: mol_type = other DNA
atgggtgatccgacctttatgaataatgtgccagaccctctgctgtcgcataaagatttgccgacgttcaagtttgaactggaaaagagcaagggcaaagtcattgggaaaagttcgtcgaaagaagcaaccgttgtccagttacctatctccaaaggcattgctggtgtgagcatgacccttgaaccgggtgcgatgcgcgaattgcactggcatgccacagcagcagagtgggctttcgtattaaccggccacgtccgtacgacggtgatcgatccacaaggtgcggccgaaaccaacgactttggaccgggcgacgtgtggtattttcctcgcggtcatgggcacatgctggaatgcctgggcgataaaccggcgcatttcattctgatcttcgataacggctacttctcagagtttggcaccttctctattactgactggatcggtcacacaccgaaagcgcttctcgccaagaactttggtctgcccgaatcggcttttgatgggtttcccaaaaaagaggtctattttgcacgtggcgcggttccaccagccacccctgcagcgcctttacagggactgaagttgccaccactcacgcataaatacgaactcctcgaacaagaacctcataaagttttcaaaggtggtcgtgaatggcgcgtggatagctcgcgttttcccatttccaagactgtaaccggcgttgttcttgatttggaacccggcgcgttacgcgagcttcactggcatcctaatgctgacgagtggcaatatgtgatcgatggcaacattagtgtgacgatgttcggttctcatggccgttaccgcaccgaacagatggagaagggtgatgtcgggtatattccacaggggtatggccacagcatcgaaaatgtgggagatcgtccttgtcgcgtcttgattggctttaacacaggtaactaccaagcgatcgacttatcacagtggattgcaggtaatcccgcggatgttcttgccacgaacttctccaaacccaccagcctctttgaaaagttcccaaaacaggacgtgtttattgctcctggcaagggccaaactggccaccatcaccatcaccat

SEQ ID NO: 582 - protein, 369 aa, synthetic construct
  REGION 1..369: note = Variant of oxalate decarboxylase from Gemmata sp. SH-PL17
MGDPTFMNNVPDPLLSHKDLPTFKFELEKSKGKVIGKSSSKEATVVQLPISKGIAGVSMTLEPGAMRELHWHATAAEWAFVLTGHVRTTVIDPQGAAETNDFGPGDVWYFPRGHGHMLECLGDKPAHFILIFDNGYFSEFGTFSITDWIGHTPKALLAKNFGLPESAFDGFPKKEVYFARGAVPPATPAAPLQGLKLPPLTHKYELLEQEPHKVFKGGREWRVDSSRFPISKTVTGVVLDLEPGALRELHWHPNADEWQYVIDGNISVTMFGSHGRYRTEQMEKGDVGYIPQGYGHSIENVGDRPCRVLIGFNTGNYQAIDLSQWIAGNPADVLATNFSKPTSLFEKFPKQDVFIAPGKGQTGHHHHHH

SEQ ID NO: 583 - DNA, 1107 bp, synthetic construct
  misc_feature 1..1107: note = Variant of oxalate decarboxylase from Gemmata sp. SH-PL17
  source 1..1107: mol_type = other DNA
atgggtgatccgacctttatgaataatgtgccagaccctctgctgtcgcataaagatttgccgacgttcaagtttgaactggaaaagagcaagggcaaagtcattgggaaaagttcgggaaaagaagcaaccgttgtccagttacctatctccaaaggcattgctggtgtgagcatgacccttgaaccgggtgcgatgcgcgaattgcactggcatgccacagcagcagagtgggctttcgtattaaccggccacgtccgtacgacggtgatcgatccacaaggtctggccgaaaccaacgactttggaccgggcgacgtgtggtattttcctcgcggtcatgggcacatgctggaatgcctgggcgataaaccggcgcatttcattctgatcttcgataacggctacttctcagagtttggcaccttctctattactgactggatcggtcacacaccgaaagcgcttctcgccaagaactttggtctgcccgaatcggcttttgatgggtttcccaaaaaagaggtctattttgcacgtggcgcggttccaccagccacccctgcagcgcctttacagggactgaagttgccaccactcacgcataaatacgaactcctcgaacaagaacctcataaagttttcaaaggtggtcgtgaatggcgcgtggatagctcgcgttttcccatttccaagactgtaaccggcgttgttcttgatttggaacccggcgcgttacgcgagcttcactggcatcctaatgctgacgagtggcaatatgtgatcgatggcaacattagtgtgacgatgttcggttctcatggccgttaccgcaccgaacagatggagaagggtgatgtcgggtatattccacaggggtatggccacagcatcgaaaatgtgggagatcgtccttgtcgcgtcttgattggctttaacacaggtaactaccaagcgatcgacttatcacagtggattgcaggtaatcccgcggatgttcttgccacgaacttctccaaacccaccagcctctttgaaaagttcccaaaacaggacgtgtttattgctcctggcaagggccaaactggccaccatcaccatcaccat

SEQ ID NO: 584 - protein, 369 aa, synthetic construct
  REGION 1..369: note = Variant of oxalate decarboxylase from Gemmata sp. SH-PL17
MGDPTFMNNVPDPLLSHKDLPTFKFELEKSKGKVIGKSSGKEATVVQLPISKGIAGVSMTLEPGAMRELHWHATAAEWAFVLTGHVRTTVIDPQGLAETNDFGPGDVWYFPRGHGHMLECLGDKPAHFILIFDNGYFSEFGTFSITDWIGHTPKALLAKNFGLPESAFDGFPKKEVYFARGAVPPATPAAPLQGLKLPPLTHKYELLEQEPHKVFKGGREWRVDSSRFPISKTVTGVVLDLEPGALRELHWHPNADEWQYVIDGNISVTMFGSHGRYRTEQMEKGDVGYIPQGYGHSIENVGDRPCRVLIGFNTGNYQAIDLSQWIAGNPADVLATNFSKPTSLFEKFPKQDVFIAPGKGQTGHHHHHH

SEQ ID NO: 585 - DNA, 1107 bp, synthetic construct
  misc_feature 1..1107: note = Variant of oxalate decarboxylase from Gemmata sp. SH-PL17
  source 1..1107: mol_type = other DNA
atgggtgatccgacctttatgaataatgtgccagaccctctgctgtcgcataaagatttgccgacgttcaagtttgaactggaaaagagcaagggcaaagtcattgggaaaagttcgggaaaagaagcaagtgttgtccagttacctatctccaaaggcattgctggtgtgagcatgacccttgaaccgggtgcgatgcgcgaattgcactggcatgccacagcagcagagtgggctttcgtattaaccggccacgtccgtacgacggtgatcgatccacaaggtgcggccgaaaccaacgactttggaccgggcgacgtgtggtattttcctcgcggtcatgggcacatgctggaatgcctgggcgataaaccggcgcatttcattctgatcttcgataacggctacttctcagagtttggcaccttctctattactgactggatcggtcacacaccgaaagcgcttctcgccaagaactttggtctgcccgaatcggcttttgatgggtttcccaaaaaagaggtctattttgcacgtggcgcggttccaccagccacccctgcagcgcctttacagggactgaagttgccaccactcacgcataaatacgaactcctcgaacaagaacctcataaagttttcaaaggtggtcgtgaatggcgcgtggatagctcgcgttttcccatttccaagactgtaaccggcgttgttcttgatttggaacccggcgcgttacgcgagcttcactggcatcctaatgctgacgagtggcaatatgtgatcgatggcaacattagtgtgacgatgttcggttctcatggccgttaccgcaccgaacagatggagaagggtgatgtcgggtatattccacaggggtatggccacagcatcgaaaatgtgggagatcgtccttgtcgcgtcttgattggctttaacacaggtaactaccaagcgatcgacttatcacagtggattgcaggtaatcccgcggatgttcttgccacgaacttctccaaacccaccagcctctttgaaaagttcccaaaacaggacgtgtttattgctcctggcaagggccaaactggccaccatcaccatcaccat

SEQ ID NO: 586 - protein, 369 aa, synthetic construct
  REGION 1..369: note = Variant of oxalate decarboxylase from Gemmata sp. SH-PL17
MGDPTFMNNVPDPLLSHKDLPTFKFELEKSKGKVIGKSSGKEASVVQLPISKGIAGVSMTLEPGAMRELHWHATAAEWAFVLTGHVRTTVIDPQGAAETNDFGPGDVWYFPRGHGHMLECLGDKPAHFILIFDNGYFSEFGTFSITDWIGHTPKALLAKNFGLPESAFDGFPKKEVYFARGAVPPATPAAPLQGLKLPPLTHKYELLEQEPHKVFKGGREWRVDSSRFPISKTVTGVVLDLEPGALRELHWHPNADEWQYVIDGNISVTMFGSHGRYRTEQMEKGDVGYIPQGYGHSIENVGDRPCRVLIGFNTGNYQAIDLSQWIAGNPADVLATNFSKPTSLFEKFPKQDVFIAPGKGQTGHHHHHH

SEQ ID NO: 587 - DNA, 1107 bp, synthetic construct
  misc_feature 1..1107: note = Variant of oxalate decarboxylase from Gemmata sp. SH-PL17
  source 1..1107: mol_type = other DNA
atgggtgatccgacctttatgaataatgtgccagaccctctgctgtcgcataaagatttgccgacgttcaagtttgaactggaaaagagcaagggcaaagtcattgggaaaagttcgggaaaagaagcaaccgttgtccagttacctatctccaaaggcattgctggtgtgagcatgacccttgaaccgggtgcgatgcgcgaattgcactggcatgccacagcagcagagtgggctttcgtattaaccggccacgtccgtacgacggtgatcgatccacaaggtagggccgaaaccaacgactttggaccgggcgacgtgtggtattttcctcgcggtcatgggcacatgctggaatgcctgggcgataaaccggcgcatttcattctgatcttcgataacggctacttctcagagtttggcaccttctctattactgactggatcggtcacacaccgaaagcgcttctcgccaagaactttggtctgcccgaatcggcttttgatgggtttcccaaaaaagaggtctattttgcacgtggcgcggttccaccagccacccctgcagcgcctttacagggactgaagttgccaccactcacgcataaatacgaactcctcgaacaagaacctcataaagttttcaaaggtggtcgtgaatggcgcgtggatagctcgcgttttcccatttccaagactgtaaccggcgttgttcttgatttggaacccggcgcgttacgcgagcttcactggcatcctaatgctgacgagtggcaatatgtgatcgatggcaacattagtgtgacgatgttcggttctcatggccgttaccgcaccgaacagatggagaagggtgatgtcgggtatattccacaggggtatggccacagcatcgaaaatgtgggagatcgtccttgtcgcgtcttgattggctttaacacaggtaactaccaagcgatcgacttatcacagtggattgcaggtaatcccgcggatgttcttgccacgaacttctccaaacccaccagcctctttgaaaagttcccaaaacaggacgtgtttattgctcctggcaagggccaaactggccaccatcaccatcaccat

SEQ ID NO: 588 - protein, 369 aa, synthetic construct
  REGION 1..369: note = Variant of oxalate decarboxylase from Gemmata sp. SH-PL17
MGDPTFMNNVPDPLLSHKDLPTFKFELEKSKGKVIGKSSGKEATVVQLPISKGIAGVSMTLEPGAMRELHWHATAAEWAFVLTGHVRTTVIDPQGRAETNDFGPGDVWYFPRGHGHMLECLGDKPAHFILIFDNGYFSEFGTFSITDWIGHTPKALLAKNFGLPESAFDGFPKKEVYFARGAVPPATPAAPLQGLKLPPLTHKYELLEQEPHKVFKGGREWRVDSSRFPISKTVTGVVLDLEPGALRELHWHPNADEWQYVIDGNISVTMFGSHGRYRTEQMEKGDVGYIPQGYGHSIENVGDRPCRVLIGFNTGNYQAIDLSQWIAGNPADVLATNFSKPTSLFEKFPKQDVFIAPGKGQTGHHHHHH

SEQ ID NO: 589 - DNA, 1107 bp, synthetic construct
  misc_feature 1..1107: note = Variant of oxalate decarboxylase from Gemmata sp. SH-PL17
  source 1..1107: mol_type = other DNA
atgggtgatccgacctttatgaataatgtgccagaccctctgctgtcgcataaagatttgccgacgttcaagtttgaactggaaaagagcaagggcaaagtcattgggaaaagttcgggaaaagaagcaaccgttgtccagttacctatctccaaaggcattgctggtgtgagcatgacccttgaaccgggtgcgatgcgcgaattgcactggcatgccacagcagcagagtggggtttcgtattaaccggccacgtccgtacgacggtgatcgatccacaaggtgcggccgaaaccaacgactttggaccgggcgacgtgtggtattttcctcgcggtcatgggcacatgctggaatgcctgggcgataaaccggcgcatttcattctgatcttcgataacggctacttctcagagtttggcaccttctctattactgactggatcggtcacacaccgaaagcgcttctcgccaagaactttggtctgcccgaatcggcttttgatgggtttcccaaaaaagaggtctattttgcacgtggcgcggttccaccagccacccctgcagcgcctttacagggactgaagttgccaccactcacgcataaatacgaactcctcgaacaagaacctcataaagttttcaaaggtggtcgtgaatggcgcgtggatagctcgcgttttcccatttccaagactgtaaccggcgttgttcttgatttggaacccggcgcgttacgcgagcttcactggcatcctaatgctgacgagtggcaatatgtgatcgatggcaacattagtgtgacgatgttcggttctcatggccgttaccgcaccgaacagatggagaagggtgatgtcgggtatattccacaggggtatggccacagcatcgaaaatgtgggagatcgtccttgtcgcgtcttgattggctttaacacaggtaactaccaagcgatcgacttatcacagtggattgcaggtaatcccgcggatgttcttgccacgaacttctccaaacccaccagcctctttgaaaagttcccaaaacaggacgtgtttattgctcctggcaagggccaaactggccaccatcaccatcaccat

SEQ ID NO: 590 - protein, 369 aa, synthetic construct
  REGION 1..369: note = Variant of oxalate decarboxylase from Gemmata sp. SH-PL17
MGDPTFMNNVPDPLLSHKDLPTFKFELEKSKGKVIGKSSGKEATVVQLPISKGIAGVSMTLEPGAMRELHWHATAAEWGFVLTGHVRTTVIDPQGAAETNDFGPGDVWYFPRGHGHMLECLGDKPAHFILIFDNGYFSEFGTFSITDWIGHTPKALLAKNFGLPESAFDGFPKKEVYFARGAVPPATPAAPLQGLKLPPLTHKYELLEQEPHKVFKGGREWRVDSSRFPISKTVTGVVLDLEPGALRELHWHPNADEWQYVIDGNISVTMFGSHGRYRTEQMEKGDVGYIPQGYGHSIENVGDRPCRVLIGFNTGNYQAIDLSQWIAGNPADVLATNFSKPTSLFEKFPKQDVFIAPGKGQTGHHHHHH

SEQ ID NO: 591 - DNA, 1107 bp, synthetic construct
  misc_feature 1..1107: note = Variant of oxalate decarboxylase from Gemmata sp. SH-PL17
  source 1..1107: mol_type = other DNA
atgggtgatccgacctttatgaataatgtgccagaccctctgctgtcgcataaagatttgccgacgttcaagtttgaactggaaaagagcaagggcaaagtcattgggaaaagttcgggaaaagaagcaaccgttgtccagttacctatctccaaaggcattgctggtgtgagcatgacccttgaaccgggtgcgatgcgcgaattgcactggcatgccacagcagcagagtgggctttcgtattaaccggccacgtccgtacgacggtgatcgatccacaaggtgcggccgaaaccaacgactttggaccgggcgacgtgtggtattttcctcgcggtcatgggcacatgctggaatgcctgggcgataaaccggcgcatttcattctgatcttcgataacggctacttctcagagtttggcaccttctctattactgactggatcggtcacacaccgaaagcgcttctcgccaagaactttggtctgcccgaatcggcttttgatgggtttcccaaaaaagaggtctattttgcacgtggcgcggttccaccagccacccctgcagcgcctttacagggactgaagttgccaccactcacgcataaatacgaactcctcgaacaagaacctcataaagttttcaaaggtggtcgtgaatggcgcgtggatagctcgcgttttcccatttccaagactgtaaccggcgttgttcttgatttggaacccggcgcgttacgcgagcttcactggcatcctaatgctgacgagtggcaatatgtgatcgatggcaacattagggtgacgatgttcggttctcatggccgttaccgcaccgaacagatggagaagggtgatgtcgggtatattccacaggggtatggccacagcatcgaaaatgtgggagatcgtccttgtcgcgtcttgattggctttaacacaggtaactaccaagcgatcgacttatcacagtggattgcaggtaatcccgcggatgttcttgccacgaacttctccaaacccaccagcctctttgaaaagttcccaaaacaggacgtgtttattgctcctggcaagggccaaactggccaccatcaccatcaccat

SEQ ID NO: 592 - protein, 369 aa, synthetic construct
  REGION 1..369: note = Variant of oxalate decarboxylase from Gemmata sp. SH-PL17
MGDPTFMNNVPDPLLSHKDLPTFKFELEKSKGKVIGKSSGKEATVVQLPISKGIAGVSMTLEPGAMRELHWHATAAEWAFVLTGHVRTTVIDPQGAAETNDFGPGDVWYFPRGHGHMLECLGDKPAHFILIFDNGYFSEFGTFSITDWIGHTPKALLAKNFGLPESAFDGFPKKEVYFARGAVPPATPAAPLQGLKLPPLTHKYELLEQEPHKVFKGGREWRVDSSRFPISKTVTGVVLDLEPGALRELHWHPNADEWQYVIDGNIRVTMFGSHGRYRTEQMEKGDVGYIPQGYGHSIENVGDRPCRVLIGFNTGNYQAIDLSQWIAGNPADVLATNFSKPTSLFEKFPKQDVFIAPGKGQTGHHHHHH

SEQ ID NO: 593 - DNA, 1107 bp, synthetic construct
  misc_feature 1..1107: note = Variant of oxalate decarboxylase from Gemmata sp. SH-PL17
  source 1..1107: mol_type = other DNA
atgggtgatccgacctttatgaataatgtgccagaccctctgctgtcgcataaagatttgccgacgttcaagtttgaactggaaaagagcaagggcaaagtcattgggaaaagttcgggaaaagaagcaaccgttgtccagttacctatctccaaaggcattgctggtgtgagcatgacccttgaaccgggtgcgatgcgcgaattgcactggcatgccacagcagcagagtgggctttcgtattaaccggccacgtccgtacgacggtgatcgatccacaaggtgcggccgaaaccaacgactttggaccgggcgacgtgtggtattttcctcgcggtcatgggcacatgctggaatgcctgggcgataaaccggcgcatttcattctgatcttcgataacggctacttctcagagtttggcaccttctctattactgactggatcggtcacacaccgaaagcgcttctcgccaagaactttggtctgcccgaatcggcttttgatgggtttcccaaaaaagaggtctattttgcacgtggcgcggttccaccagccacccctgcagcgcctttacagggactgaagttgccaccactcacgcataaatacgaactcctcgaacaagaacctcataaagttttcaaaggtggtcgtgaatggcgcgtggatagctcgcgttttcccatttccaagactgtaaccggcgttgttcttgatttggaacccggcgcgttacgcgagcttcactggcatcctaatgctgacgagtggcaatatgtgatcgatggcaacgttagtgtgacgatgttcggttctcatggccgttaccgcaccgaacagatggagaagggtgatgtcgggtatattccacaggggtatggccacagcatcgaaaatgtgggagatcgtccttgtcgcgtcttgattggctttaacacaggtaactaccaagcgatcgacttatcacagtggattgcaggtaatcccgcggatgttcttgccacgaacttctccaaacccaccagcctctttgaaaagttcccaaaacaggacgtgtttattgctcctggcaagggccaaactggccaccatcaccatcaccat

SEQ ID NO: 594 - protein, 369 aa, synthetic construct
  REGION 1..369: note = Variant of oxalate decarboxylase from Gemmata sp. SH-PL17
MGDPTFMNNVPDPLLSHKDLPTFKFELEKSKGKVIGKSSGKEATVVQLPISKGIAGVSMTLEPGAMRELHWHATAAEWAFVLTGHVRTTVIDPQGAAETNDFGPGDVWYFPRGHGHMLECLGDKPAHFILIFDNGYFSEFGTFSITDWIGHTPKALLAKNFGLPESAFDGFPKKEVYFARGAVPPATPAAPLQGLKLPPLTHKYELLEQEPHKVFKGGREWRVDSSRFPISKTVTGVVLDLEPGALRELHWHPNADEWQYVIDGNVSVTMFGSHGRYRTEQMEKGDVGYIPQGYGHSIENVGDRPCRVLIGFNTGNYQAIDLSQWIAGNPADVLATNFSKPTSLFEKFPKQDVFIAPGKGQTGHHHHHH

SEQ ID NO: 595 - DNA, 1107 bp, synthetic construct
  misc_feature 1..1107: note = Variant of oxalate decarboxylase from Gemmata sp. SH-PL17
  source 1..1107: mol_type = other DNA
atgggtgatccgacctttatgaataatgtgccagaccctctgctgtcgcataaagatttgccgacgttcaagtttgaactggaaaagagcaagggcaaagtcattgggaaaagttcgggaaaagaagcaaccgttgtccagttacctatctccaaaggcattgctggtgtgagcatgacccttgaaccgggtgcgatgcgcgaattgcactggcatgccacagcagcagagtgggctttcgtattaaccggccacgtccgtacgacggtgatcgatccacaaggtgcggccgaaaccaacgactttggaccgggcgacgtgtggtattttcctcgcggtcatgggcacatgctggaatgcctgggcgataaaccggcgcatttcattctgatcttcgataacggctacttctcagagtttggcaccttctctattactgactggatcggtcacacaccgaaagcgcttctcgccaagacgtttggtctgcccgaatcggcttttgatgggtttcccaaaaaagaggtctattttgcacgtggcgcggttccaccagccacccctgcagcgcctttacagggactgaagttgccaccactcacgcataaatacgaactcctcgaacaagaacctcataaagttttcaaaggtggtcgtgaatggcgcgtggatagctcgcgttttcccatttccaagactgtaaccggcgttgttcttgatttggaacccggcgcgttacgcgagcttcactggcatcctaatgctgacgagtggcaatatgtgatcgatggcaacattagtgtgacgatgttcggttctcatggccgttaccgcaccgaacagatggagaagggtgatgtcgggtatattccacaggggtatggccacagcatcgaaaatgtgggagatcgtccttgtcgcgtcttgattggctttaacacaggtaactaccaagcgatcgacttatcacagtggattgcaggtaatcccgcggatgttcttgccacgaacttctccaaacccaccagcctctttgaaaagttcccaaaacaggacgtgtttattgctcctggcaagggccaaactggccaccatcaccatcaccat

SEQ ID NO: 596 - protein, 369 aa, synthetic construct
  REGION 1..369: note = Variant of oxalate decarboxylase from Gemmata sp. SH-PL17
MGDPTFMNNVPDPLLSHKDLPTFKFELEKSKGKVIGKSSGKEATVVQLPISKGIAGVSMTLEPGAMRELHWHATAAEWAFVLTGHVRTTVIDPQGAAETNDFGPGDVWYFPRGHGHMLECLGDKPAHFILIFDNGYFSEFGTFSITDWIGHTPKALLAKTFGLPESAFDGFPKKEVYFARGAVPPATPAAPLQGLKLPPLTHKYELLEQEPHKVFKGGREWRVDSSRFPISKTVTGVVLDLEPGALRELHWHPNADEWQYVIDGNISVTMFGSHGRYRTEQMEKGDVGYIPQGYGHSIENVGDRPCRVLIGFNTGNYQAIDLSQWIAGNPADVLATNFSKPTSLFEKFPKQDVFIAPGKGQTGHHHHHH

SEQ ID NO: 597 - DNA, 1107 bp, synthetic construct
  misc_feature 1..1107: note = Variant of oxalate decarboxylase from Gemmata sp. SH-PL17
  source 1..1107: mol_type = other DNA
atgggtgatccgacctttatgaataatgtgccagaccctctgctgtcgcataaagatttgccgacgttcaagtttgaactggaaaagagcaagggcaaagtcattgggaaaagttcgggaaaagaagcaaccgttgtccagttacctatctccaaaggcattgctggtgtgagcatgacccttgaaccgggtgcgatgcgcgaattgcactggcatgccacagcagcagagtgggctttcgtattaaccggccacgtccgtacgacggtgatcgatccacaaggtgcggccgaaaccaacgactttggaccgggcgacgtgtggtattttcctcgcggtcatgggcacatgctggaatgcctgggcgataaaccggcgcatttcattctgatcttcgataacggctacttctcagagtttggcaccttctctattactgactggatcggtcacacaccgaaagcgcttctcgccaagaactttggtctgcccgaatcggcttttgatgggtttcccaaaaaagaggtctattttgcacgtggcgcggttccaccagccacccctgcagcgcctttacagggactgaagttgccaccactcacgcataaatacgaactcctcgaacaagaacctcataaagttttcaaaggtggtcgtgaatggcgcgtggatagctcgcgttttcccatttccaagactgtaaccggcgttgttcttgatttggaacccggcgcgttacgcgagcttcactggcatcctaatgctgacgagtggcaatatgtgatcgatggcaacattagtgtgacgatgttcggttctcatggccgtactcgcaccgaacagatggagaagggtgatgtcgggtatattccacaggggtatggccacagcatcgaaaatgtgggagatcgtccttgtcgcgtcttgattggctttaacacaggtaactaccaagcgatcgacttatcacagtggattgcaggtaatcccgcggatgttcttgccacgaacttctccaaacccaccagcctctttgaaaagttcccaaaacaggacgtgtttattgctcctggcaagggccaaactggccaccatcaccatcaccat

SEQ ID NO: 598 - protein, 369 aa, synthetic construct
  REGION 1..369: note = Variant of oxalate decarboxylase from Gemmata sp. SH-PL17
MGDPTFMNNVPDPLLSHKDLPTFKFELEKSKGKVIGKSSGKEATVVQLPISKGIAGVSMTLEPGAMRELHWHATAAEWAFVLTGHVRTTVIDPQGAAETNDFGPGDVWYFPRGHGHMLECLGDKPAHFILIFDNGYFSEFGTFSITDWIGHTPKALLAKNFGLPESAFDGFPKKEVYFARGAVPPATPAAPLQGLKLPPLTHKYELLEQEPHKVFKGGREWRVDSSRFPISKTVTGVVLDLEPGALRELHWHPNADEWQYVIDGNISVTMFGSHGRTRTEQMEKGDVGYIPQGYGHSIENVGDRPCRVLIGFNTGNYQAIDLSQWIAGNPADVLATNFSKPTSLFEKFPKQDVFIAPGKGQTGHHHHHH

SEQ ID NO: 599 - DNA, 1107 bp, synthetic construct
  misc_feature 1..1107: note = Variant of oxalate decarboxylase from Gemmata sp. SH-PL17
  source 1..1107: mol_type = other DNA
atgggtgatccgacctttatgaataatgtgccagaccctctgctgtcgcataaagatttgccgacgttcaagtttgaactggaaaagagcaagggcaaagtcattgggaaaagttcgggaaaagaagcaaccgttgtccagttacctatctccaaaggcattgctggtgtgagcatgacccttgaaccgggtgcgatgcgcgaattgcactggcatgccacagcagcagagtgggctttcgtattaaccggccacgtccgtacgacggtgatcgatccacaaggtgcggccgaaaccaacgactttggaccgggcgacgtgtggtattttcctcgcggtcatgggcacatgctggaatgcctgggcgataaaccggcgcatttcattctgatcttcgataacggctacttctcagagtttggcaccttctctattactgactggacgggtcacacaccgaaagcgcttctcgccaagaactttggtctgcccgaatcggcttttgatgggtttcccaaaaaagaggtctattttgcacgtggcgcggttccaccagccacccctgcagcgcctttacagggactgaagttgccaccactcacgcataaatacgaactcctcgaacaagaacctcataaagttttcaaaggtggtcgtgaatggcgcgtggatagctcgcgttttcccatttccaagactgtaaccggcgttgttcttgatttggaacccggcgcgttacgcgagcttcactggcatcctaatgctgacgagtggcaatatgtgatcgatggcaacattagtgtgacgatgttcggttctcatggccgttaccgcaccgaacagatggagaagggtgatgtcgggtatattccacaggggtatggccacagcatcgaaaatgtgggagatcgtccttgtcgcgtcttgattggctttaacacaggtaactaccaagcgatcgacttatcacagtggattgcaggtaatcccgcggatgttcttgccacgaacttctccaaacccaccagcctctttgaaaagttcccaaaacaggacgtgtttattgctcctggcaagggccaaactggccaccatcaccatcaccat

SEQ ID NO: 600 - protein, 369 aa, synthetic construct
  REGION 1..369: note = Variant of oxalate decarboxylase from Gemmata sp. SH-PL17
MGDPTFMNNVPDPLLSHKDLPTFKFELEKSKGKVIGKSSGKEATVVQLPISKGIAGVSMTLEPGAMRELHWHATAAEWAFVLTGHVRTTVIDPQGAAETNDFGPGDVWYFPRGHGHMLECLGDKPAHFILIFDNGYFSEFGTFSITDWTGHTPKALLAKNFGLPESAFDGFPKKEVYFARGAVPPATPAAPLQGLKLPPLTHKYELLEQEPHKVFKGGREWRVDSSRFPISKTVTGVVLDLEPGALRELHWHPNADEWQYVIDGNISVTMFGSHGRYRTEQMEKGDVGYIPQGYGHSIENVGDRPCRVLIGFNTGNYQAIDLSQWIAGNPADVLATNFSKPTSLFEKFPKQDVFIAPGKGQTGHHHHHH

SEQ ID NO: 601 - DNA, 1107 bp, synthetic construct
  misc_feature 1..1107: note = Variant of oxalate decarboxylase from Gemmata sp. SH-PL17
  source 1..1107: mol_type = other DNA
atgggtgatccgacctttatgaataatgtgccagaccctctgctgtcgcataaagatttgccgcggttcaagtttgaactggaaaagagcaagggcaaagtcattgggaaaagttcgggaaaagaagcaaccgttgtccagttacctatctccaaaggcattgctggtgtgagcatgacccttgaaccgggtgcgatgcgcgaattgcactggcatgccacagcagcagagtgggctttcgtattaaccggccacgtccgtacgacggtgatcgatccacaaggtgcggccgaaaccaacgactttggaccgggcgacgtgtggtattttcctcgcggtcatgggcacatgctggaatgcctgggcgataaaccggcgcatttcattctgatcttcgataacggctacttctcagagtttggcaccttctctattactgactggatcggtcacacaccgaaagcgcttctcgccaagaactttggtctgcccgaatcggcttttgatgggtttcccaaaaaagaggtctattttgcacgtggcgcggttccaccagccacccctgcagcgcctttacagggactgaagttgccaccactcacgcataaatacgaactcctcgaacaagaacctcataaagttttcaaaggtggtcgtgaatggcgcgtggatagctcgcgttttcccatttccaagactgtaaccggcgttgttcttgatttggaacccggcgcgttacgcgagcttcactggcatcctaatgctgacgagtggcaatatgtgatcgatggcaacattagtgtgacgatgttcggttctcatggccgttaccgcaccgaacagatggagaagggtgatgtcgggtatattccacaggggtatggccacagcatcgaaaatgtgggagatcgtccttgtcgcgtcttgattggctttaacacaggtaactaccaagcgatcgacttatcacagtggattgcaggtaatcccgcggatgttcttgccacgaacttctccaaacccaccagcctctttgaaaagttcccaaaacaggacgtgtttattgctcctggcaagggccaaactggccaccatcaccatcaccat

SEQ ID NO: 602 - protein, 369 aa, synthetic construct
  REGION 1..369: note = Variant of oxalate decarboxylase from Gemmata sp. SH-PL17
MGDPTFMNNVPDPLLSHKDLPRFKFELEKSKGKVIGKSSGKEATVVQLPISKGIAGVSMTLEPGAMRELHWHATAAEWAFVLTGHVRTTVIDPQGAAETNDFGPGDVWYFPRGHGHMLECLGDKPAHFILIFDNGYFSEFGTFSITDWIGHTPKALLAKNFGLPESAFDGFPKKEVYFARGAVPPATPAAPLQGLKLPPLTHKYELLEQEPHKVFKGGREWRVDSSRFPISKTVTGVVLDLEPGALRELHWHPNADEWQYVIDGNISVTMFGSHGRYRTEQMEKGDVGYIPQGYGHSIENVGDRPCRVLIGFNTGNYQAIDLSQWIAGNPADVLATNFSKPTSLFEKFPKQDVFIAPGKGQTGHHHHHH

SEQ ID NO: 603 - DNA, 1107 bp, synthetic construct
  misc_feature 1..1107: note = Variant of oxalate decarboxylase from Gemmata sp. SH-PL17
  source 1..1107: mol_type = other DNA
atgggtgatccgacctttatgaataatgtgccagaccctctgctgtcgcataaagatttgccgacgttcaagtttgaactggaaaagagcaagggcaaagtcattgggaaaagttcgggaaaagaagcaaccgttgtccagttacctatctccaaaggcattgctggtgtgagcatgacccttgaaccgggtgcgatgcgcgaattgcactggcatgccacagcagcagagtgggctttcgtattaaccggccacgtccgtacgacggtgatcgatccacaaggtgcggccgaaaccaacgactttggaccgggcgacgtgtggtattttcctcgcggtcatgggcacatgctggaatgcctgggcgataaaccggcgcatttcattctgatcttcgataacggctacttctcagagtttggcaccttctctattactgactggatcggtcacacaccgaaagcgcttctcgccaagaactttggtctgcccgaatcggcttttgatgggtttcccaaaaaagaggtctattttgcacgtggcgcggttccaccagccacccctgcagcgcctttacagggactgaagttgccaccactcacgcataaatacgaactcctcgaacaagaacctcataaagttttcaaaggtggtcgtgaatggcgcgtggatagctcgcgttttcccatttccaagactctgaccggcgttgttcttgatttggaacccggcgcgttacgcgagcttcactggcatcctaatgctgacgagtggcaatatgtgatcgatggcaacattagtgtgacgatgttcggttctcatggccgttaccgcaccgaacagatggagaagggtgatgtcgggtatattccacaggggtatggccacagcatcgaaaatgtgggagatcgtccttgtcgcgtcttgattggctttaacacaggtaactaccaagcgatcgacttatcacagtggattgcaggtaatcccgcggatgttcttgccacgaacttctccaaacccaccagcctctttgaaaagttcccaaaacaggacgtgtttattgctcctggcaagggccaaactggccaccatcaccatcaccat

SEQ ID NO: 604 - protein, 369 aa, synthetic construct
  REGION 1..369: note = Variant of oxalate decarboxylase from Gemmata sp. SH-PL17
MGDPTFMNNVPDPLLSHKDLPTFKFELEKSKGKVIGKSSGKEATVVQLPISKGIAGVSMTLEPGAMRELHWHATAAEWAFVLTGHVRTTVIDPQGAAETNDFGPGDVWYFPRGHGHMLECLGDKPAHFILIFDNGYFSEFGTFSITDWIGHTPKALLAKNFGLPESAFDGFPKKEVYFARGAVPPATPAAPLQGLKLPPLTHKYELLEQEPHKVFKGGREWRVDSSRFPISKTLTGVVLDLEPGALRELHWHPNADEWQYVIDGNISVTMFGSHGRYRTEQMEKGDVGYIPQGYGHSIENVGDRPCRVLIGFNTGNYQAIDLSQWIAGNPADVLATNFSKPTSLFEKFPKQDVFIAPGKGQTGHHHHHH

SEQ ID NO: 605 - DNA, 1107 bp, synthetic construct
  misc_feature 1..1107: note = Variant of oxalate decarboxylase from Gemmata sp. SH-PL17
  source 1..1107: mol_type = other DNA
atgggtgatccgacctttatgaataatgtgccagaccctctgctgtcgcataaagatttgccgacgttcaagtttgaactggaaaagagcaagggcaaagtcattgggaaaagttcgggaaaagaagcaaccgttgtccagttacctatctccaaaggcctggctggtgtgagcatgacccttgaaccgggtgcgatgcgcgaattgcactggcatgccacagcagcagagtgggctttcgtattaaccggccacgtccgtacgacggtgatcgatccacaaggtgcggccgaaaccaacgactttggaccgggcgacgtgtggtattttcctcgcggtcatgggcacatgctggaatgcctgggcgataaaccggcgcatttcattctgatcttcgataacggctacttctcagagtttggcaccttctctattactgactggatcggtcacacaccgaaagcgcttctcgccaagaactttggtctgcccgaatcggcttttgatgggtttcccaaaaaagaggtctattttgcacgtggcgcggttccaccagccacccctgcagcgcctttacagggactgaagttgccaccactcacgcataaatacgaactcctcgaacaagaacctcataaagttttcaaaggtggtcgtgaatggcgcgtggatagctcgcgttttcccatttccaagactgtaaccggcgttgttcttgatttggaacccggcgcgttacgcgagcttcactggcatcctaatgctgacgagtggcaatatgtgatcgatggcaacattagtgtgacgatgttcggttctcatggccgttaccgcaccgaacagatggagaagggtgatgtcgggtatattccacaggggtatggccacagcatcgaaaatgtgggagatcgtccttgtcgcgtcttgattggctttaacacaggtaactaccaagcgatcgacttatcacagtggattgcaggtaatcccgcggatgttcttgccacgaacttctccaaacccaccagcctctttgaaaagttcccaaaacaggacgtgtttattgctcctggcaagggccaaactggccaccatcaccatcaccat

SEQ ID NO: 606 - protein, 369 aa, synthetic construct
  REGION 1..369: note = Variant of oxalate decarboxylase from Gemmata sp. SH-PL17
MGDPTFMNNVPDPLLSHKDLPTFKFELEKSKGKVIGKSSGKEATVVQLPISKGLAGVSMTLEPGAMRELHWHATAAEWAFVLTGHVRTTVIDPQGAAETNDFGPGDVWYFPRGHGHMLECLGDKPAHFILIFDNGYFSEFGTFSITDWIGHTPKALLAKNFGLPESAFDGFPKKEVYFARGAVPPATPAAPLQGLKLPPLTHKYELLEQEPHKVFKGGREWRVDSSRFPISKTVTGVVLDLEPGALRELHWHPNADEWQYVIDGNISVTMFGSHGRYRTEQMEKGDVGYIPQGYGHSIENVGDRPCRVLIGFNTGNYQAIDLSQWIAGNPADVLATNFSKPTSLFEKFPKQDVFIAPGKGQTGHHHHHH

SEQ ID NO: 607 - DNA, 1107 bp, synthetic construct
  misc_feature 1..1107: note = Variant of oxalate decarboxylase from Gemmata sp. SH-PL17
  source 1..1107: mol_type = other DNA
atgggtgatccgacctttatgaataatgtgccagaccctctgctgtcgcataaagatttgccgacgttcaagtttgaactggaaaagagcaagggcaaagtcattgggaaaagttcgggaaaagaagcaaccgttgtccagttacctatctccaaaggcattgctggtgtgagcatgacccttgaaccgggtgcgatgcgcgaattgcactggcatgccacagcagcagagtgggctttcgtattaaccggccacgtccgtacgacggtgatcgatccacaaggtgcggccgaaaccaacgactttggaccgggcgacgtgtggtattttcctcgcggtcatgggcacatgctggaatgcctgggcgataaaccggcgcatttcattctgatcttcgataacggctacttctcagagtttggcaccttctctattactgactggatcggtcacacaccgaaagcgcttctcgccaagaactttggtctgcccgaatcggcttttgatgggtttcccaaaaaagaggtctattttgcacgtggcgcggttccaccagccacccctgcagcgcctttacagggactgaagttgccaccactcacgcataaatacgaactcctcgaacaagaacctcataaagttttcaaaggtggtcgtgaatggcgcgtggatagctcgcgttttcccatttccaagactgtaaccggcgttgttcttgatttggaacccggcgcgttacgcgagcttcactggcatcctaatgctgacgagtggcaatatgtgatcgatggcaacattagtgtgacgatgttcggttctcatggccgttaccgcaccgaacagatggagaagggtgatgtcgggtatattccacaggggtatggccactatatcgaaaatgtgggagatcgtccttgtcgcgtcttgattggctttaacacaggtaactaccaagcgatcgacttatcacagtggattgcaggtaatcccgcggatgttcttgccacgaacttctccaaacccaccagcctctttgaaaagttcccaaaacaggacgtgtttattgctcctggcaagggccaaactggccaccatcaccatcaccat

SEQ ID NO: 608 - protein, 369 aa, synthetic construct
  REGION 1..369: note = Variant of oxalate decarboxylase from Gemmata sp. SH-PL17
MGDPTFMNNVPDPLLSHKDLPTFKFELEKSKGKVIGKSSGKEATVVQLPISKGIAGVSMTLEPGAMRELHWHATAAEWAFVLTGHVRTTVIDPQGAAETNDFGPGDVWYFPRGHGHMLECLGDKPAHFILIFDNGYFSEFGTFSITDWIGHTPKALLAKNFGLPESAFDGFPKKEVYFARGAVPPATPAAPLQGLKLPPLTHKYELLEQEPHKVFKGGREWRVDSSRFPISKTVTGVVLDLEPGALRELHWHPNADEWQYVIDGNISVTMFGSHGRYRTEQMEKGDVGYIPQGYGHYIENVGDRPCRVLIGFNTGNYQAIDLSQWIAGNPADVLATNFSKPTSLFEKFPKQDVFIAPGKGQTGHHHHHH

SEQ ID NO: 609 - DNA, 1107 bp, synthetic construct
  misc_feature 1..1107: note = Variant of oxalate decarboxylase from Gemmata sp. SH-PL17
  source 1..1107: mol_type = other DNA
atgggtgatccgacctttatgaataatgtgccagaccctctgctgtcgcataaagatttgccgacgttcaagtttgaactggaaaagagcaagggcaaagtcattgggaaaagttcgggaaaagaagcaaccgttgtccagttacctatctccaaaggcattgctggtgtgagcatgacccttgaaccgggtgcgatgcgcgaattgcactggcatgccacagcagcagagtgggctttcgtattaaccggccacgtccgtacgacggtgatcgatccacaaggtgcggccgaaaccaacgactttggaccgggcgacgtgtggtattttcctcgcggtcatgggcacatgctggaatgcctgggcgataaaccggcgcatttcattctgatcttcgataacggctacttctcagagtttggcaccttctctattactgactggatcggtcacacaccgaaagcgcttctcgccaagaactttggtctgcccgaatcggcttttgatgggtttcccaaaaaagaggtctattttgcacgtggcgcggttccaccagccacccctgcagcgcctttacagggactgaagttgccaccactcacgcataaatacgaactcctcgaacaagaacctcataaagttttcaaaggtggtcgtgaatggcgcgtggatagctcgcgttttcccatttccaagactgtaaccggcgttgttcttgatttggaacccggcgcgttacgcgagcttcactggcatcctaatgctgacgagtggcaatatgtgatcgatggcaacattagtgtgacgatgttcggttctcatggccgtgctcgcaccgaacagatggagaagggtgatgtcgggtatattccacaggggtatggccacagcatcgaaaatgtgggagatcgtccttgtcgcgtcttgattggctttaacacaggtaactaccaagcgatcgacttatcacagtggattgcaggtaatcccgcggatgttcttgccacgaacttctccaaacccaccagcctctttgaaaagttcccaaaacaggacgtgtttattgctcctggcaagggccaaactggccaccatcaccatcaccat

SEQ ID NO: 610 - protein, 369 aa, synthetic construct
  REGION 1..369: note = Variant of oxalate decarboxylase from Gemmata sp. SH-PL17
MGDPTFMNNVPDPLLSHKDLPTFKFELEKSKGKVIGKSSGKEATVVQLPISKGIAGVSMTLEPGAMRELHWHATAAEWAFVLTGHVRTTVIDPQGAAETNDFGPGDVWYFPRGHGHMLECLGDKPAHFILIFDNGYFSEFGTFSITDWIGHTPKALLAKNFGLPESAFDGFPKKEVYFARGAVPPATPAAPLQGLKLPPLTHKYELLEQEPHKVFKGGREWRVDSSRFPISKTVTGVVLDLEPGALRELHWHPNADEWQYVIDGNISVTMFGSHGRARTEQMEKGDVGYIPQGYGHSIENVGDRPCRVLIGFNTGNYQAIDLSQWIAGNPADVLATNFSKPTSLFEKFPKQDVFIAPGKGQTGHHHHHH

SEQ ID NO: 611 - DNA, 1107 bp, synthetic construct
  misc_feature 1..1107: note = Variant of oxalate decarboxylase from Gemmata sp. SH-PL17
  source 1..1107: mol_type = other DNA
atgggtgatccgacctttatgaataatgtgccagaccctctgctgtcgcataaagatttgccgacgttcaagtttgaactggaaaagagcaagggcaaagtcattgggaaaagttcgggaaaagaagcaaccgttgtccagttacctatctccaaaggcattgctggtgtgagcatgacccttgaaccgggtgcgatgcgcgaattgcactggcatgccacagcagcagagtgggctttcgtattaaccggccacgtccgtacgacggtgatcgatccacaaggtgcggccgaaaccaacgactttggaccgggctgtgtgtggtattttcctcgcggtcatgggcacatgctggaatgcctgggcgataaaccggcgcatttcattctgatcttcgataacggctacttctcagagtttggcaccttctctattactgactggatcggtcacacaccgaaagcgcttctcgccaagaactttggtctgcccgaatcggcttttgatgggtttcccaaaaaagaggtctattttgcacgtggcgcggttccaccagccacccctgcagcgcctttacagggactgaagttgccaccactcacgcataaatacgaactcctcgaacaagaacctcataaagttttcaaaggtggtcgtgaatggcgcgtggatagctcgcgttttcccatttccaagactgtaaccggcgttgttcttgatttggaacccggcgcgttacgcgagcttcactggcatcctaatgctgacgagtggcaatatgtgatcgatggcaacattagtgtgacgatgttcggttctcatggccgttaccgcaccgaacagatggagaagggtgatgtcgggtatattccacaggggtatggccacagcatcgaaaatgtgggagatcgtccttgtcgcgtcttgattggctttaacacaggtaactaccaagcgatcgacttatcacagtggattgcaggtaatcccgcggatgttcttgccacgaacttctccaaacccaccagcctctttgaaaagttcccaaaacaggacgtgtttattgctcctggcaagggccaaactggccaccatcaccatcaccat

SEQ ID NO: 612 - protein, 369 aa, synthetic construct
  REGION 1..369: note = Variant of oxalate decarboxylase from Gemmata sp. SH-PL17
MGDPTFMNNVPDPLLSHKDLPTFKFELEKSKGKVIGKSSGKEATVVQLPISKGIAGVSMTLEPGAMRELHWHATAAEWAFVLTGHVRTTVIDPQGAAETNDFGPGCVWYFPRGHGHMLECLGDKPAHFILIFDNGYFSEFGTFSITDWIGHTPKALLAKNFGLPESAFDGFPKKEVYFARGAVPPATPAAPLQGLKLPPLTHKYELLEQEPHKVFKGGREWRVDSSRFPISKTVTGVVLDLEPGALRELHWHPNADEWQYVIDGNISVTMFGSHGRYRTEQMEKGDVGYIPQGYGHSIENVGDRPCRVLIGFNTGNYQAIDLSQWIAGNPADVLATNFSKPTSLFEKFPKQDVFIAPGKGQTGHHHHHH

SEQ ID NO: 613 - DNA, 1107 bp, synthetic construct
  misc_feature 1..1107: note = Variant of oxalate decarboxylase from Gemmata sp. SH-PL17
  source 1..1107: mol_type = other DNA
atgggtgatccgacctttatgaataatgtgccagaccatctgctgtcgcataaagatttgccgacgttcaagtttgaactggaaaagagcaagggcaaagtcattgggaaaagttcgggaaaagaatgtaccgttgtccagttacctatctccaaaggcattgctggtgtgagcatgacccttgaaccgggtgcgatgcgcgaattgcactggcatgccacagcagcagagtgggctttcgtattaaccggccacgtccgtacgacggtgatcgatccacaaggtgcggccgaaaccaacgactttggaccgggcgacgtgtggtattttcctcgcggtcatgggcacatgctggaatgcctgggcgataaaccggcgcatttcattctgatcttcgataacggctacttctcagagtttggcaccttctctattactgactggatcggtcacacaccgaaagcgcttctcgccaagaactttggtctgcccgaatcggcttttgatgggtttcccaaaaaagaggtctattttgcacgtggcgcggttccaccagccacccctgcagcgcctttacagggactgaagttgccaccactcacgcataaatacgaactcctcgaacaagaacctcataaagttttcaaaggtggtcgtgaatggcgcgtggatagctcgcgttttcccatttccaagactgtaaccggcgttgttcttgatttggaacccggcgcgttacgcgagcttcactggcatcctaatgctgacgagtggcaatatgtgatcgatggcaacattagtgtgacgatgttcggttctcatggccgttaccgcaccgaacagatggagaagggtgatgtcgggtatattccacaggggtatggccacagcatcgaaaatgtgggagatcgtccttgtcgcgtcttgattggctttaacacaggtaactaccaagcgatcgacttatcacagtggattgcaggtaatcccgcggatgttcttgccacgaacttctccaaacccaccagcctctttgaaaagttcccaaaacaggacgtgtttattgctcctggcaagggccaaactggccaccatcaccatcaccat

SEQ ID NO: 614 - protein, 369 aa, synthetic construct
  REGION 1..369: note = Variant of oxalate decarboxylase from Gemmata sp. SH-PL17
MGDPTFMNNVPDHLLSHKDLPTFKFELEKSKGKVIGKSSGKECTVVQLPISKGIAGVSMTLEPGAMRELHWHATAAEWAFVLTGHVRTTVIDPQGAAETNDFGPGDVWYFPRGHGHMLECLGDKPAHFILIFDNGYFSEFGTFSITDWIGHTPKALLAKNFGLPESAFDGFPKKEVYFARGAVPPATPAAPLQGLKLPPLTHKYELLEQEPHKVFKGGREWRVDSSRFPISKTVTGVVLDLEPGALRELHWHPNADEWQYVIDGNISVTMFGSHGRYRTEQMEKGDVGYIPQGYGHSIENVGDRPCRVLIGFNTGNYQAIDLSQWIAGNPADVLATNFSKPTSLFEKFPKQDVFIAPGKGQTGHHHHHH

SEQ ID NO: 615 - DNA, 1077 bp, synthetic construct
  misc_feature 1..1077: note = Variant of oxalate decarboxylase from Gemmata sp. SH-PL17
  source 1..1077: mol_type = other DNA
atgggtgaccctacctttatgaacaatgtaccagaccctgtgctgtcgggcaaagatttgccgacgttcaagtttgaactggaaaagagcaagggcaaagtcattggggggagttcgggaaaagaagcaaccgttgtccagttacctatctccaaaggcattgctggtgtgagcatgacccttgaaccgggtgcgatgcgcgaattgcactggcatgccacagcagcagagtgggggttcgtattaaccggccacgtccgtacgacggtgatcgatccacaaggtgcggccgaaaccaacgactttggaccgggcgacgtgtggtattttcctcgcggtcatgggcacatgctggaatgcctgggcgataaaccggcgcatttcattctgatcttcgataacggctacttctcagagtttggcaccttctctattactgactggatcggtcacacaccgaaagcgcttctcgccaagaactttggtctgcccgaatcggcttttgatgggtttcccaaaaaagaggtctattttgcacgtggcgcggttccaccagccacccctgcagcgcctttacagggactgaagctgccaccactcacgcataaatacgaactcctcgaacaagaacctcacaaagtttttaaaggtggtcgtgaatggcgcgtggatagctcgcgttttcccatttccaagactgtaaccggcgttgttcttgatttggaacccggcgcgttacgcgagcttcactggcatcctaatgctgacgagtggcaatatgtgatcgatggcaacattagtgtgacgatgttcggttctcatggccgttaccgcaccgaacagatggagaagggtgatgtcgggtatattccacaggggtatggccacagcatcgaaaatgttggagatcgtccttgtcgcgtcttgattggctttaacacaggtaactaccaagcgatcgacttatcacagtggattgcaggtaatcccgcggatgttcttgccacgaacttctccaaacccaccagcctctttgaaaagttcccaaaacaggacgtgtttattgctcctggcaag

SEQ ID NO: 616 - protein, 359 aa, synthetic construct
  REGION 1..359: note = Variant of oxalate decarboxylase from Gemmata sp. SH-PL17
MGDPTFMNNVPDPVLSGKDLPTFKFELEKSKGKVIGGSSGKEATVVQLPISKGIAGVSMTLEPGAMRELHWHATAAEWGFVLTGHVRTTVIDPQGAAETNDFGPGDVWYFPRGHGHMLECLGDKPAHFILIFDNGYFSEFGTFSITDWIGHTPKALLAKNFGLPESAFDGFPKKEVYFARGAVPPATPAAPLQGLKLPPLTHKYELLEQEPHKVFKGGREWRVDSSRFPISKTVTGVVLDLEPGALRELHWHPNADEWQYVIDGNISVTMFGSHGRYRTEQMEKGDVGYIPQGYGHSIENVGDRPCRVLIGFNTGNYQAIDLSQWIAGNPADVLATNFSKPTSLFEKFPKQDVFIAPGK

SEQ ID NO: 617 - DNA, 1077 bp, synthetic construct
  misc_feature 1..1077: note = Variant of oxalate decarboxylase from Gemmata sp. SH-PL17
  source 1..1077: mol_type = other DNA
atgggtgaccctacctttatgaacaatgtaccagaccctgtgctgtcgggcaaagatttgccgacgttcaagtttgaactggaaaagagcaagggcaaagtcattgggaaaagttcgggaaaagaagcaaccgttgtccagttacctatctccaaaggcattgctggtgtgagcatgacccttgaaccgggtgcgatgcgcgaattgcactggcatgccacagcagcagagtgggggttcgtattaaccggccacgtccgtacgacggtgatcgatccacaaggtgcggccgaaaccaacgactttggaccgggcgacgtgtggtattttcctcgcggtcatgggcacatgctggaatgcctgggcgataaatttgcgcatttcattctgatcttcgataacggctacttctcagagtttggcaccttctctattactgactggatcggtcacacaccgaaagcgcttctcgccaagaactttggtctgcccgaatcggcttttgatgggtttcccaaaaaagaggtctattttgcacgtggcgcggttccaccagccacccctgcagcgcctttacagggactgaagctgccaccactcacgcataaatacgaactcctcgaacaagaacctcacaaagtttttaaaggtggtcgtgaatggcgcgtggatagctcgcgttttcccatttccaagactgtaaccggcgttgttcttgatttggaacccggcgcgttacgcgagcttcactggcatcctaatgctgacgagtggcaatatgtgatcgatggcaacattagtgtgacgatgttcggttctcatggccgttaccgcaccgaacagatggagaagggtgatgtcgggtatattccacaggggtatggccacagcatcgaaaatgttggagatcgtccttgtcgcgtcttgattggctttaacacaggtaactaccaagcgatcgacttatcacagtggattgcaggtaatcccgcggatgttcttgccacgaacttctccaaacccaccagcctctttgaaaagttcccaaaacaggacgtgtttattgctcctggcaag

SEQ ID NO: 618 - protein, 359 aa, synthetic construct
  REGION 1..359: note = Variant of oxalate decarboxylase from Gemmata sp. SH-PL17
MGDPTFMNNVPDPVLSGKDLPTFKFELEKSKGKVIGKSSGKEATVVQLPISKGIAGVSMTLEPGAMRELHWHATAAEWGFVLTGHVRTTVIDPQGAAETNDFGPGDVWYFPRGHGHMLECLGDKFAHFILIFDNGYFSEFGTFSITDWIGHTPKALLAKNFGLPESAFDGFPKKEVYFARGAVPPATPAAPLQGLKLPPLTHKYELLEQEPHKVFKGGREWRVDSSRFPISKTVTGVVLDLEPGALRELHWHPNADEWQYVIDGNISVTMFGSHGRYRTEQMEKGDVGYIPQGYGHSIENVGDRPCRVLIGFNTGNYQAIDLSQWIAGNPADVLATNFSKPTSLFEKFPKQDVFIAPGK

SEQ ID NO: 619 - DNA, 1077 bp, synthetic construct
  misc_feature 1..1077: note = Variant of oxalate decarboxylase from Gemmata sp. SH-PL17
  source 1..1077: mol_type = other DNA
atgggtgaccctacctttatgaacaatgtaccagaccctgtgctgtcgggcaaagatttgccgacgttcaagtttgaactggaaaagagcaagggcaaagtcattgggaaaagttcgggaaaagaagcaaccgttgtccagttacctatctccaaaggcattgctggtgtgagcatgacccttgaaccgggtgcgatgcgcgaattgcactggcatgccacagcagcagagtgggggttcgtattaaccggccacgtccgtacgacggtgatcgatccacaaggtgcggccgaaaccaacgactttggaccgggcgacgtgtggtattttcctcgcggtcatgggcacatgctggaatgcctgggcgataaaccggcgcatttcattctgatcttcgataacggctacttctcagagtttggcaccttctctattactgactggatcggtcacacaccgaaagcgcttctcgccaagaactttaagctgcccgaatcggcttttgatgggtttcccaaaaaagaggtctattttgcacgtggcgcggttccaccagccacccctgcagcgcctttacagggactgaagctgccaccactcacgcataaatacgaactcctcgaacaagaacctcacaaagtttttaaaggtggtcgtgaatggcgcgtggatagctcgcgttttcccatttccaagactgtaaccggcgttgttcttgatttggaacccggcgcgttacgcgagcttcactggcatcctaatgctgacgagtggcaatatgtgatcgatggcaacattagtgtgacgatgttcggttctcatggccgttaccgcaccgaacagatggagaagggtgatgtcgggtatattccacaggggtatggccacagcatcgaaaatgttggagatcgtccttgtcgcgtcttgattggctttaacacaggtaactaccaagcgatcgacttatcacagtggattgcaggtaatcccgcggatgttcttgccacgaacttctccaaacccaccagcctctttgaaaagttcccaaaacaggacgtgtttattgctcctggcaag

SEQ ID NO: 620 - protein, 359 aa, synthetic construct
  REGION 1..359: note = Variant of oxalate decarboxylase from Gemmata sp. SH-PL17
MGDPTFMNNVPDPVLSGKDLPTFKFELEKSKGKVIGKSSGKEATVVQLPISKGIAGVSMTLEPGAMRELHWHATAAEWGFVLTGHVRTTVIDPQGAAETNDFGPGDVWYFPRGHGHMLECLGDKPAHFILIFDNGYFSEFGTFSITDWIGHTPKALLAKNFKLPESAFDGFPKKEVYFARGAVPPATPAAPLQGLKLPPLTHKYELLEQEPHKVFKGGREWRVDSSRFPISKTVTGVVLDLEPGALRELHWHPNADEWQYVIDGNISVTMFGSHGRYRTEQMEKGDVGYIPQGYGHSIENVGDRPCRVLIGFNTGNYQAIDLSQWIAGNPADVLATNFSKPTSLFEKFPKQDVFIAPGK

SEQ ID NO: 621 - DNA, 1077 bp, synthetic construct
  misc_feature 1..1077: note = Variant of oxalate decarboxylase from Gemmata sp. SH-PL17
  source 1..1077: mol_type = other DNA
atgggtgaccctacctttatgaacaatgtaccagaccctgtgctgtcgggcaaagatttgccgacgttcaagtttgaactggaaaagagcaagggcaaagtcattgggaaaagttcgggaaaagaagcaaccgttgtccagttacctatctccaaaggcattgctggtgtgagcatgacccttgaaccgggtgcgatgcgcgaattgcactggcatgccacagcagcagagtgggggttcgtattaaccggccacgtccgtacgacggtgatcgatccaactggtgcggccgaaaccaacgactttggaccgggcgacgtgtggtattttcctcgcggtcatgggcacatgctggaatgcctgggcgataaaccggcgcatttcattctgatcttcgataacggctacttctcagagtttggcaccttctctattactgactggatcggtcacacaccgaaagcgcttctcgccaagaactttggtctgcccgaatcggcttttgatgggtttcccaaaaaagaggtctattttgcacgtggcgcggttccaccagccacccctgcagcgcctttacagggactgaagctgccaccactcacgcataaatacgaactcctcgaacaagaacctcacaaagtttttaaaggtggtcgtgaatggcgcgtggatagctcgcgttttcccatttccaagactgtaaccggcgttgttcttgatttggaacccggcgcgttacgcgagcttcactggcatcctaatgctgacgagtggcaatatgtgatcgatggcaacattagtgtgacgatgttcggttctcatggccgttaccgcaccgaacagatggagaagggtgatgtcgggtatattccacaggggtatggccacagcatcgaaaatgttggagatcgtccttgtcgcgtcttgattggctttaacacaggtaactaccaagcgatcgacttatcacagtggattgcaggtaatcccgcggatgttcttgccacgaacttctccaaacccaccagcctctttgaaaagttcccaaaacaggacgtgtttattgctcctggcaag

SEQ ID NO: 622 - protein, 359 aa, synthetic construct
  REGION 1..359: note = Variant of oxalate decarboxylase from Gemmata sp. SH-PL17
MGDPTFMNNVPDPVLSGKDLPTFKFELEKSKGKVIGKSSGKEATVVQLPISKGIAGVSMTLEPGAMRELHWHATAAEWGFVLTGHVRTTVIDPTGAAETNDFGPGDVWYFPRGHGHMLECLGDKPAHFILIFDNGYFSEFGTFSITDWIGHTPKALLAKNFGLPESAFDGFPKKEVYFARGAVPPATPAAPLQGLKLPPLTHKYELLEQEPHKVFKGGREWRVDSSRFPISKTVTGVVLDLEPGALRELHWHPNADEWQYVIDGNISVTMFGSHGRYRTEQMEKGDVGYIPQGYGHSIENVGDRPCRVLIGFNTGNYQAIDLSQWIAGNPADVLATNFSKPTSLFEKFPKQDVFIAPGK

SEQ ID NO: 623 - DNA, 1077 bp, synthetic construct
  misc_feature 1..1077: note = Variant of oxalate decarboxylase from Gemmata sp. SH-PL17
  source 1..1077: mol_type = other DNA
atgggtgaccctacctttatgaacaatgtaccagaccctgtgctgtcgggcaaagatttgccgacgttcaagtttgaactggaaaagagcaagggcaaagtcattgggaaaagttcgggaaaagaagcaaccgttgtccagttacctatctccaaaggcattgctggtgtgagcatgacccttgaaccgggtgcgatgcgcgaattgcactggcatgccacagcagcagagtgggggttcgtattaaccggccacgtccgtacgacggtgatcgatccacaaggtgcggccgaaaccaacgactttggaccgggcgacgtgtggtattttcctcgcggtcatgggcacatgctggaatgcctgggcgataaaccggcgcatttcattctgatcttcgataacggctacttctcagagtttggcaccttctctattactgactggatcggtcacacaccgaaagcgcttctcgccaagaactttggtctgcccgaatcggcttttgatgggtttcccaaaaaagaggtctattttgcacgtggcgcggttccaccagccacccctgcagcgcctttacagggatggaagctgccaccactcacgcataaatacgaactcctcgaacaagaacctcacaaagtttttaaaggtggtcgtgaatggcgcgtggatagctcgcgttttcccatttccaagactgtaaccggcgttgttcttgatttggaacccggcgcgttacgcgagcttcactggcatcctaatgctgacgagtggcaatatgtgatcgatggcaacattagtgtgacgatgttcggttctcatggccgttaccgcaccgaacagatggagaagggtgatgtcgggtatattccacaggggtatggccacagcatcgaaaatgttggagatcgtccttgtcgcgtcttgattggctttaacacaggtaactaccaagcgatcgacttatcacagtggattgcaggtaatcccgcggatgttcttgccacgaacttctccaaacccaccagcctctttgaaaagttcccaaaacaggacgtgtttattgctcctggcaag

SEQ ID NO: 624 - protein, 359 aa, synthetic construct
  REGION 1..359: note = Variant of oxalate decarboxylase from Gemmata sp. SH-PL17
MGDPTFMNNVPDPVLSGKDLPTFKFELEKSKGKVIGKSSGKEATVVQLPISKGIAGVSMTLEPGAMRELHWHATAAEWGFVLTGHVRTTVIDPQGAAETNDFGPGDVWYFPRGHGHMLECLGDKPAHFILIFDNGYFSEFGTFSITDWIGHTPKALLAKNFGLPESAFDGFPKKEVYFARGAVPPATPAAPLQGWKLPPLTHKYELLEQEPHKVFKGGREWRVDSSRFPISKTVTGVVLDLEPGALRELHWHPNADEWQYVIDGNISVTMFGSHGRYRTEQMEKGDVGYIPQGYGHSIENVGDRPCRVLIGFNTGNYQAIDLSQWIAGNPADVLATNFSKPTSLFEKFPKQDVFIAPGK

SEQ ID NO: 625 - DNA, 1077 bp, synthetic construct
  misc_feature 1..1077: note = Variant of oxalate decarboxylase from Gemmata sp. SH-PL17
  source 1..1077: mol_type = other DNA
atgggtgaccctacctttatgaacaatgtaccagaccctgtgctgtcgggcaaagatttgccgacgttcaagtttgaactggaaaagagcaagggcaaagtcattgggaaaagttcgggaaaagaagcaaccgttgtccagttacctatctccaaaggcattgctggtgtgagcatgacccttgaaccgggtgcgatgcgcgaattgcactggcatgccacagcagcagagtgggggttcgtattaaccggcagggtccgtacgacggtgatcgatccacaaggtgcggccgaaaccaacgactttggaccgggcgacgtgtggtattttcctcgcggtcatgggcacatgctggaatgcctgggcgataaaccggcgcatttcattctgatcttcgataacggctacttctcagagtttggcaccttctctattactgactggatcggtcacacaccgaaagcgcttctcgccaagaactttggtctgcccgaatcggcttttgatgggtttcccaaaaaagaggtctattttgcacgtggcgcggttccaccagccacccctgcagcgcctttacagggactgaagctgccaccactcacgcataaatacgaactcctcgaacaagaacctcacaaagtttttaaaggtggtcgtgaatggcgcgtggatagctcgcgttttcccatttccaagactgtaaccggcgttgttcttgatttggaacccggcgcgttacgcgagcttcactggcatcctaatgctgacgagtggcaatatgtgatcgatggcaacattagtgtgacgatgttcggttctcatggccgttaccgcaccgaacagatggagaagggtgatgtcgggtatattccacaggggtatggccacagcatcgaaaatgttggagatcgtccttgtcgcgtcttgattggctttaacacaggtaactaccaagcgatcgacttatcacagtggattgcaggtaatcccgcggatgttcttgccacgaacttctccaaacccaccagcctctttgaaaagttcccaaaacaggacgtgtttattgctcctggcaag

SEQ ID NO: 626 - protein, 359 aa, synthetic construct
  REGION 1..359: note = Variant of oxalate decarboxylase from Gemmata sp. SH-PL17
MGDPTFMNNVPDPVLSGKDLPTFKFELEKSKGKVIGKSSGKEATVVQLPISKGIAGVSMTLEPGAMRELHWHATAAEWGFVLTGRVRTTVIDPQGAAETNDFGPGDVWYFPRGHGHMLECLGDKPAHFILIFDNGYFSEFGTFSITDWIGHTPKALLAKNFGLPESAFDGFPKKEVYFARGAVPPATPAAPLQGLKLPPLTHKYELLEQEPHKVFKGGREWRVDSSRFPISKTVTGVVLDLEPGALRELHWHPNADEWQYVIDGNISVTMFGSHGRYRTEQMEKGDVGYIPQGYGHSIENVGDRPCRVLIGFNTGNYQAIDLSQWIAGNPADVLATNFSKPTSLFEKFPKQDVFIAPGK

SEQ ID NO: 627 - DNA, 1077 bp, synthetic construct
  misc_feature 1..1077: note = Variant of oxalate decarboxylase from Gemmata sp. SH-PL17
  source 1..1077: mol_type = other DNA
atgggtgaccctacctttatgaacaatgtaccagaccctgtgctgtcgggcaaagatttgccgacgttcaagtttgaactggaaaagagcaagggcaaagtcattgggaaaagttcgggaaaagaagcaaccgttgtccagttacctatctccaaaggcattgctggtgtgagcatgacccttgaaccgggtgcgatgcgcgaattgcactggcatgccacagcagcagagtgggggttcgtattaaccggccacgtccgtacgacggtgatcgatccacaaggtgcggccgaaaccaacgactttagtccgggcgacgtgtggtattttcctcgcggtcatgggcacatgctggaatgcctgggcgataaaccggcgcatttcattctgatcttcgataacggctacttctcagagtttggcaccttctctattactgactggatcggtcacacaccgaaagcgcttctcgccaagaactttggtctgcccgaatcggcttttgatgggtttcccaaaaaagaggtctattttgcacgtggcgcggttccaccagccacccctgcagcgcctttacagggactgaagctgccaccactcacgcataaatacgaactcctcgaacaagaacctcacaaagtttttaaaggtggtcgtgaatggcgcgtggatagctcgcgttttcccatttccaagactgtaaccggcgttgttcttgatttggaacccggcgcgttacgcgagcttcactggcatcctaatgctgacgagtggcaatatgtgatcgatggcaacattagtgtgacgatgttcggttctcatggccgttaccgcaccgaacagatggagaagggtgatgtcgggtatattccacaggggtatggccacagcatcgaaaatgttggagatcgtccttgtcgcgtcttgattggctttaacacaggtaactaccaagcgatcgacttatcacagtggattgcaggtaatcccgcggatgttcttgccacgaacttctccaaacccaccagcctctttgaaaagttcccaaaacaggacgtgtttattgctcctggcaag

SEQ ID NO: 628 - protein, 359 aa, synthetic construct
  REGION 1..359: note = Variant of oxalate decarboxylase from Gemmata sp. SH-PL17
MGDPTFMNNVPDPVLSGKDLPTFKFELEKSKGKVIGKSSGKEATVVQLPISKGIAGVSMTLEPGAMRELHWHATAAEWGFVLTGHVRTTVIDPQGAAETNDFSPGDVWYFPRGHGHMLECLGDKPAHFILIFDNGYFSEFGTFSITDWIGHTPKALLAKNFGLPESAFDGFPKKEVYFARGAVPPATPAAPLQGLKLPPLTHKYELLEQEPHKVFKGGREWRVDSSRFPISKTVTGVVLDLEPGALRELHWHPNADEWQYVIDGNISVTMFGSHGRYRTEQMEKGDVGYIPQGYGHSIENVGDRPCRVLIGFNTGNYQAIDLSQWIAGNPADVLATNFSKPTSLFEKFPKQDVFIAPGK

SEQ ID NO: 629 - DNA, 1077 bp, synthetic construct
  misc_feature 1..1077: note = Variant of oxalate decarboxylase from Gemmata sp. SH-PL17
  source 1..1077: mol_type = other DNA
atgggtgaccctacctttatgaacaatgtaccagaccctgtgctgtcgggcaaagatttgccgacgttcaagtttgaactggaaaagagcaagggcaaagtcattgggaaaagttcgggaaaagaagcaaccgttgtccagttacctatctccaaaggcattgctggtgtgagcatgacccttgaaccgggtgcgatgcgcgaattgcactggcatgccacagcagcagagtgggggttcgtattaaccggccacgtccgtacgacggtgatcgatccacaaggtgcggccgaaaccaacgactttggaccgggcgacgtgtggtattttcctcgcggtcatgggcacatgctggaatgcctgggcgataaaccggcgcatttcattctgatcttcgataacggctacttctcagagtttggcaccttctctattactgactggatcggtcacacaccgaaagcgcttctcgccaagaactttggtctgcccgaatcggcttttgatgggtttcccaaaaaagaggtctattttgcacgtggcgcggttccaccagccacccctgcagcgcctttacagggactgaagctgccaccactcacgcataaatacgaactcctcgaacaagaacctcacaaagtttttaaaggtggtcgtgaatggcgcgtggatagctcgcgttttcccatttccactactgtaaccggcgttgttcttgatttggaacccggcgcgttacgcgagcttcactggcatcctaatgctgacgagtggcaatatgtgatcgatggcaacattagtgtgacgatgttcggttctcatggccgttaccgcaccgaacagatggagaagggtgatgtcgggtatattccacaggggtatggccacagcatcgaaaatgttggagatcgtccttgtcgcgtcttgattggctttaacacaggtaactaccaagcgatcgacttatcacagtggattgcaggtaatcccgcggatgttcttgccacgaacttctccaaacccaccagcctctttgaaaagttcccaaaacaggacgtgtttattgctcctggcaag

SEQ ID NO: 630 - protein, 359 aa, synthetic construct
  REGION 1..359: note = Variant of oxalate decarboxylase from Gemmata sp. SH-PL17
MGDPTFMNNVPDPVLSGKDLPTFKFELEKSKGKVIGKSSGKEATVVQLPISKGIAGVSMTLEPGAMRELHWHATAAEWGFVLTGHVRTTVIDPQGAAETNDFGPGDVWYFPRGHGHMLECLGDKPAHFILIFDNGYFSEFGTFSITDWIGHTPKALLAKNFGLPESAFDGFPKKEVYFARGAVPPATPAAPLQGLKLPPLTHKYELLEQEPHKVFKGGREWRVDSSRFPISTTVTGVVLDLEPGALRELHWHPNADEWQYVIDGNISVTMFGSHGRYRTEQMEKGDVGYIPQGYGHSIENVGDRPCRVLIGFNTGNYQAIDLSQWIAGNPADVLATNFSKPTSLFEKFPKQDVFIAPGK

SEQ ID NO: 631 - DNA, 1077 bp, synthetic construct
  misc_feature 1..1077: note = Variant of oxalate decarboxylase from Gemmata sp. SH-PL17
  source 1..1077: mol_type = other DNA
atgggtgaccctacctttatgaacaatgtaccagaccctgtgctgtcgggcaaagatttgccgacgttcaagtttgaactggaaaagagcaagggcaaagtcattgggaaaagttcgggaaaagaagcaaccgttgtccagttacctatctccaaaggcattgctggtgtgagcatgacccttgaaccgggtgcgatgcgcgaattgcactggcatgccacagcagcagagtgggggttcgtattaaccggccacgtccgtacgacggtgatcgatccacaaggtgcggccgaaaccaacgactttggaccgggcgacgtgtggtattttcctcgcggtcatgggcacatgctggaatgcctgggcgataaaccggcgcatttcattctgatcttcgataacggctacttctcagagtttggcaccttctctattactgactggatcggtcacacaccgaaagcgcttctcgccaagaactttggtctgcccgaatcggcttttgatgggtttcccaaaaaagaggtctattttgcacgtggcgcggttccaccagccacccctagggcgcctttacagggactgaagctgccaccactcacgcataaatacgaactcctcgaacaagaacctcacaaagtttttaaaggtggtcgtgaatggcgcgtggatagctcgcgttttcccatttccaagactgtaaccggcgttgttcttgatttggaacccggcgcgttacgcgagcttcactggcatcctaatgctgacgagtggcaatatgtgatcgatggcaacattagtgtgacgatgttcggttctcatggccgttaccgcaccgaacagatggagaagggtgatgtcgggtatattccacaggggtatggccacagcatcgaaaatgttggagatcgtccttgtcgcgtcttgattggctttaacacaggtaactaccaagcgatcgacttatcacagtggattgcaggtaatcccgcggatgttcttgccacgaacttctccaaacccaccagcctctttgaaaagttcccaaaacaggacgtgtttattgctcctggcaag

SEQ ID NO: 632 - protein, 359 aa, synthetic construct
  REGION 1..359: note = Variant of oxalate decarboxylase from Gemmata sp. SH-PL17
MGDPTFMNNVPDPVLSGKDLPTFKFELEKSKGKVIGKSSGKEATVVQLPISKGIAGVSMTLEPGAMRELHWHATAAEWGFVLTGHVRTTVIDPQGAAETNDFGPGDVWYFPRGHGHMLECLGDKPAHFILIFDNGYFSEFGTFSITDWIGHTPKALLAKNFGLPESAFDGFPKKEVYFARGAVPPATPRAPLQGLKLPPLTHKYELLEQEPHKVFKGGREWRVDSSRFPISKTVTGVVLDLEPGALRELHWHPNADEWQYVIDGNISVTMFGSHGRYRTEQMEKGDVGYIPQGYGHSIENVGDRPCRVLIGFNTGNYQAIDLSQWIAGNPADVLATNFSKPTSLFEKFPKQDVFIAPGK

SEQ ID NO: 633 - DNA, 1077 bp, synthetic construct
  misc_feature 1..1077: note = Variant of oxalate decarboxylase from Gemmata sp. SH-PL17
  source 1..1077: mol_type = other DNA
atgggtgaccctacctttatgaacaatgtaccagaccctgtgctgtcgggcaaagatttgccgacgttcaagtttgaactggaaaagagcaagggcaaagtcattgggaaaagttcgggaaaagaagcaaccgttgtccagttacctatctccaaaggcattgctggtgtgagcatgacccttgaaccgggtgcgatgcgcgaattgcactggcatgccacagcagcagagtgggggttcgtattaaccggccacgtccgtacgacggtgatcgatccacaaggtgcggccgaaaccaacgactttggaccgggcgacgtgtggtattttcctcgcggtcatgggcacatgctggaatgcctgggcgataaaccggcgcatttcattctgatcttcgataacggctacttctcagagtttggcaccttctctattactgactggatcggtcacacaccgaaagcgcttctcgccaagaactttggtctgcccgaatcggcttttgatgggtttcccaaaaaagaggtctattttgcacgtggcgcggttccaccaaatacccctgcagcgcctttacagggactgaagctgccaccactcacgcataaatacgaactcctcgaacaagaacctcacaaagtttttaaaggtggtcgtgaatggcgcgtggatagctcgcgttttcccatttccaagactgtaaccggcgttgttcttgatttggaacccggcgcgttacgcgagcttcactggcatcctaatgctgacgagtggcaatatgtgatcgatggcaacattagtgtgacgatgttcggttctcatggccgttaccgcaccgaacagatggagaagggtgatgtcgggtatattccacaggggtatggccacagcatcgaaaatgttggagatcgtccttgtcgcgtcttgattggctttaacacaggtaactaccaagcgatcgacttatcacagtggattgcaggtaatcccgcggatgttcttgccacgaacttctccaaacccaccagcctctttgaaaagttcccaaaacaggacgtgtttattgctcctggcaag

SEQ ID NO: 634 - protein, 359 aa, synthetic construct
  REGION 1..359: note = Variant of oxalate decarboxylase from Gemmata sp. SH-PL17
MGDPTFMNNVPDPVLSGKDLPTFKFELEKSKGKVIGKSSGKEATVVQLPISKGIAGVSMTLEPGAMRELHWHATAAEWGFVLTGHVRTTVIDPQGAAETNDFGPGDVWYFPRGHGHMLECLGDKPAHFILIFDNGYFSEFGTFSITDWIGHTPKALLAKNFGLPESAFDGFPKKEVYFARGAVPPNTPAAPLQGLKLPPLTHKYELLEQEPHKVFKGGREWRVDSSRFPISKTVTGVVLDLEPGALRELHWHPNADEWQYVIDGNISVTMFGSHGRYRTEQMEKGDVGYIPQGYGHSIENVGDRPCRVLIGFNTGNYQAIDLSQWIAGNPADVLATNFSKPTSLFEKFPKQDVFIAPGK

SEQ ID NO: 635 - DNA, 1077 bp, synthetic construct
  misc_feature 1..1077: note = Variant of oxalate decarboxylase from Gemmata sp. SH-PL17
  source 1..1077: mol_type = other DNA
atgggtgaccctacctttatgaacaatgtaccagaccctgtgctgtcgggcaaagatttgccgacgttcaagtttgaactggaaaagagcaagggcaaagtcattgggaaaagttcgggaaaagaagcaaccgttgtccagttacctatctccaaaggcattgctggtgtgagcatgacccttgaaccgggtgcgatgcgcgaattgcactggcatgccacagcagcagagtgggggttcgtattaaccggccacgtccgtacgacggtgatcgatccacaaggtgcggccgaaaccaacgactttggaccgggcgacgtgtggtattttcctcgcggtcatgggcacatgctggaatgcctgggcgataaaccggcgcatttcattctgatcttcgataacggctacttctcagagtttggcaccttctctattactgactggatcggtcacacaccgaaaaggcttctcgccaagaactttggtctgcccgaatcggcttttgatgggtttcccaaaaaagaggtctattttgcacgtggcgcggttccaccagccacccctgcagcgcctttacagggactgaagctgccaccactcacgcataaatacgaactcctcgaacaagaacctcacaaagtttttaaaggtggtcgtgaatggcgcgtggatagctcgcgttttcccatttccaagactgtaaccggcgttgttcttgatttggaacccggcgcgttacgcgagcttcactggcatcctaatgctgacgagtggcaatatgtgatcgatggcaacattagtgtgacgatgttcggttctcatggccgttaccgcaccgaacagatggagaagggtgatgtcgggtatattccacaggggtatggccacagcatcgaaaatgttggagatcgtccttgtcgcgtcttgattggctttaacacaggtaactaccaagcgatcgacttatcacagtggattgcaggtaatcccgcggatgttcttgccacgaacttctccaaacccaccagcctctttgaaaagttcccaaaacaggacgtgtttattgctcctggcaag

SEQ ID NO: 636 - protein, 359 aa, synthetic construct
  REGION 1..359: note = Variant of oxalate decarboxylase from Gemmata sp. SH-PL17
MGDPTFMNNVPDPVLSGKDLPTFKFELEKSKGKVIGKSSGKEATVVQLPISKGIAGVSMTLEPGAMRELHWHATAAEWGFVLTGHVRTTVIDPQGAAETNDFGPGDVWYFPRGHGHMLECLGDKPAHFILIFDNGYFSEFGTFSITDWIGHTPKRLLAKNFGLPESAFDGFPKKEVYFARGAVPPATPAAPLQGLKLPPLTHKYELLEQEPHKVFKGGREWRVDSSRFPISKTVTGVVLDLEPGALRELHWHPNADEWQYVIDGNISVTMFGSHGRYRTEQMEKGDVGYIPQGYGHSIENVGDRPCRVLIGFNTGNYQAIDLSQWIAGNPADVLATNFSKPTSLFEKFPKQDVFIAPGK

SEQ ID NO: 637 - DNA, 1077 bp, synthetic construct
  misc_feature 1..1077: note = Variant of oxalate decarboxylase from Gemmata sp. SH-PL17
  source 1..1077: mol_type = other DNA
atgggtgaccctacctttatgaacaatgtaccagaccctgtgctgtcgggcaaagatttgccgacgttcaagtttgaactggaaaagagcaagggcaaagtcattgggaaaagttcgggaaaagaagcaaccgttgtccagttacctatctccaaaggcattgctggtgtgagcatgacccttgaaccgggtgcgatgcgcgaattgcactggcatgccacagcagcagagtgggggttcgtattaaccggccacgtccgtacgacggtgatcgatccacaaggtgcggccgaaaccaacgactttggaccgggcgacgtgtggtattttcctcgcggtcatgggcacatgctggaatgcctgggcgataaaccggcgcatttcattctgatcttcgataacggctacttctcagagtttggcaccttctctattactgactggatcggtcacacaccgaaagcgcttctcgccaagaactttggtctgcccgaatcggcttttgatgggtttcccaaaaaagaggtctattttgcacgtggcgcggttccaccagccacccctgcagcgcctttagctggactgaagctgccaccactcacgcataaatacgaactcctcgaacaagaacctcacaaagtttttaaaggtggtcgtgaatggcgcgtggatagctcgcgttttcccatttccaagactgtaaccggcgttgttcttgatttggaacccggcgcgttacgcgagcttcactggcatcctaatgctgacgagtggcaatatgtgatcgatggcaacattagtgtgacgatgttcggttctcatggccgttaccgcaccgaacagatggagaagggtgatgtcgggtatattccacaggggtatggccacagcatcgaaaatgttggagatcgtccttgtcgcgtcttgattggctttaacacaggtaactaccaagcgatcgacttatcacagtggattgcaggtaatcccgcggatgttcttgccacgaacttctccaaacccaccagcctctttgaaaagttcccaaaacaggacgtgtttattgctcctggcaag

SEQ ID NO: 638 - protein, 359 aa, synthetic construct
  REGION 1..359: note = Variant of oxalate decarboxylase from Gemmata sp. SH-PL17
MGDPTFMNNVPDPVLSGKDLPTFKFELEKSKGKVIGKSSGKEATVVQLPISKGIAGVSMTLEPGAMRELHWHATAAEWGFVLTGHVRTTVIDPQGAAETNDFGPGDVWYFPRGHGHMLECLGDKPAHFILIFDNGYFSEFGTFSITDWIGHTPKALLAKNFGLPESAFDGFPKKEVYFARGAVPPATPAAPLAGLKLPPLTHKYELLEQEPHKVFKGGREWRVDSSRFPISKTVTGVVLDLEPGALRELHWHPNADEWQYVIDGNISVTMFGSHGRYRTEQMEKGDVGYIPQGYGHSIENVGDRPCRVLIGFNTGNYQAIDLSQWIAGNPADVLATNFSKPTSLFEKFPKQDVFIAPGK

SEQ ID NO: 639 - DNA, 1077 bp, synthetic construct
  misc_feature 1..1077: note = Variant of oxalate decarboxylase from Gemmata sp. SH-PL17
  source 1..1077: mol_type = other DNA
atgggtgaccctacctttatgaacaatgtaccagaccctgtgctgtcgggcaaagatttgccgacgttcaagtttgaactggaaaagagcaagggcaaagtcattgggaaaagttcgggaaaagaagcaaccgttgtccagttacctatctccaaaggcattgctggtgtgagcatgacccttgaaccgggtgcgatgcgcgaattgcactggcatgccacagcagcagagtgggggttcgtattaaccggccacgtccgtacgacggtgatcgatccacaaggtgcggccgaaaccaacgactttggaccgggcgacgtgtggtattttcctcgcggtcatgggcacatgctggaatgcctgggcgataaaccggcgcatttcattctgatcttcgataacggctacttctcagagtttggcaccttctctattactgactggatcggtcacacaccgaaagcgcttctcgccaagaactttggtctgcccgaatcggcttttgatgggtttcccaaaaaagaggtctattttgcacgtggcgcggttccaccagccacccctgcagcgcctttacagggactgaagctgccaccactcacgcataaatacgaactcctcgaacaagaacctcacaaagtttttaaaggtggtcgtgaatggcgcgtggatagctcgcgttttcccatttccaagactgtaaccggcgttgttcttgatttggaacccggcgcgttacgcgagcttcactggcatcctaatgctgacgagtggcaatatgtgatcgatggcaacattagtgtgacgatgttcggttctcatggccgttaccgcaccgaacagatggagaagggtgatgtcgggtatattccacaggggtatggccacagcatcgaaaatgttggagatcgtccttgtcgcgtcttgattggctttaacacaggtaactaccaagcgatcgacttatcacagtggattgcaggtaatcccgcggatgttcttgccacgaacttctccaaacccgcgagcctctttgaaaagttcccaaaacaggacgtgtttattgctcctggcaag

SEQ ID NO: 640 - protein, 359 aa, synthetic construct
  REGION 1..359: note = Variant of oxalate decarboxylase from Gemmata sp. SH-PL17
MGDPTFMNNVPDPVLSGKDLPTFKFELEKSKGKVIGKSSGKEATVVQLPISKGIAGVSMTLEPGAMRELHWHATAAEWGFVLTGHVRTTVIDPQGAAETNDFGPGDVWYFPRGHGHMLECLGDKPAHFILIFDNGYFSEFGTFSITDWIGHTPKALLAKNFGLPESAFDGFPKKEVYFARGAVPPATPAAPLQGLKLPPLTHKYELLEQEPHKVFKGGREWRVDSSRFPISKTVTGVVLDLEPGALRELHWHPNADEWQYVIDGNISVTMFGSHGRYRTEQMEKGDVGYIPQGYGHSIENVGDRPCRVLIGFNTGNYQAIDLSQWIAGNPADVLATNFSKPASLFEKFPKQDVFIAPGK

SEQ ID NO: 641 - DNA, 1077 bp, synthetic construct
  misc_feature 1..1077: note = Variant of oxalate decarboxylase from Gemmata sp. SH-PL17
  source 1..1077: mol_type = other DNA
atgggtgaccctacctttatgaacaatgtaccagaccctgtgctgtcgggcaaagatttgccgacgttcaagtttgaactggaaaagagcaagggcaaagtcattgggaaaagttcgggaaaagaagcaaccgttgtccagttacctatctccaaaggcattgctggtgtgagcatgacccttgaaccgggtgcgatgcgcgaattgcactggcatgccacagcagcagagtgggggttcgtattaaccggccacgtccgtacgacggtgatcgatccacaaggtgcggccgaaaccaacgactttggaccgggcgacgtgtggtattttcctcgcggtcatgggcacatgctggaatgcctgggcgataaaccggcgcatttcattctgatcttcgataacggctacttctcagagtttggcaccttctctattactgactggatcggtcacacaccgaaagcgcttctcgccaagaactttggtctgcccgaatcggcttttgatgggtttcccaaaaaagaggtctattttgcacgtggcgcggttccaccagccacccctgcagcgcctttacagggactggttctgccaccactcacgcataaatacgaactcctcgaacaagaacctcacaaagtttttaaaggtggtcgtgaatggcgcgtggatagctcgcgttttcccatttccaagactgtaaccggcgttgttcttgatttggaacccggcgcgttacgcgagcttcactggcatcctaatgctgacgagtggcaatatgtgatcgatggcaacattagtgtgacgatgttcggttctcatggccgttaccgcaccgaacagatggagaagggtgatgtcgggtatattccacaggggtatggccacagcatcgaaaatgttggagatcgtccttgtcgcgtcttgattggctttaacacaggtaactaccaagcgatcgacttatcacagtggattgcaggtaatcccgcggatgttcttgccacgaacttctccaaacccaccagcctctttgaaaagttcccaaaacaggacgtgtttattgctcctggcaag

SEQ ID NO: 642 - protein, 359 aa, synthetic construct
  REGION 1..359: note = Variant of oxalate decarboxylase from Gemmata sp. SH-PL17
MGDPTFMNNVPDPVLSGKDLPTFKFELEKSKGKVIGKSSGKEATVVQLPISKGIAGVSMTLEPGAMRELHWHATAAEWGFVLTGHVRTTVIDPQGAAETNDFGPGDVWYFPRGHGHMLECLGDKPAHFILIFDNGYFSEFGTFSITDWIGHTPKALLAKNFGLPESAFDGFPKKEVYFARGAVPPATPAAPLQGLVLPPLTHKYELLEQEPHKVFKGGREWRVDSSRFPISKTVTGVVLDLEPGALRELHWHPNADEWQYVIDGNISVTMFGSHGRYRTEQMEKGDVGYIPQGYGHSIENVGDRPCRVLIGFNTGNYQAIDLSQWIAGNPADVLATNFSKPTSLFEKFPKQDVFIAPGK

SEQ ID NO: 643 - DNA, 1077 bp, synthetic construct
  misc_feature 1..1077: note = Variant of oxalate decarboxylase from Gemmata sp. SH-PL17
  source 1..1077: mol_type = other DNA
atgggtgaccctacctttatgaacaatgtaccagaccctgtgctgtcgggcaaagatttgccgacgttcaagtttgaactggaaaagagcaagggcaaagtcattgggaaaagttcgggaaaagaagcaaccgttgtccagttacctatctccaaaggcattgctggtgtgagcatgacccttgaatctggtgcgatgcgcgaattgcactggcatgccacagcagcagagtgggggttcgtattaaccggccacgtccgtacgacggtgatcgatccacaaggtgcggccgaaaccaacgactttggaccgggcgacgtgtggtattttcctcgcggtcatgggcacatgctggaatgcctgggcgataaaccggcgcatttcattctgatcttcgataacggctacttctcagagtttggcaccttctctattactgactggatcggtcacacaccgaaagcgcttctcgccaagaactttggtctgcccgaatcggcttttgatgggtttcccaaaaaagaggtctattttgcacgtggcgcggttccaccagccacccctgcagcgcctttacagggactgaagctgccaccactcacgcataaatacgaactcctcgaacaagaacctcacaaagtttttaaaggtggtcgtgaatggcgcgtggatagctcgcgttttcccatttccaagactgtaaccggcgttgttcttgatttggaacccggcgcgttacgcgagcttcactggcatcctaatgctgacgagtggcaatatgtgatcgatggcaacattagtgtgacgatgttcggttctcatggccgttaccgcaccgaacagatggagaagggtgatgtcgggtatattccacaggggtatggccacagcatcgaaaatgttggagatcgtccttgtcgcgtcttgattggctttaacacaggtaactaccaagcgatcgacttatcacagtggattgcaggtaatcccgcggatgttcttgccacgaacttctccaaacccaccagcctctttgaaaagttcccaaaacaggacgtgtttattgctcctggcaag

SEQ ID NO: 644 - protein, 359 aa, synthetic construct
  REGION 1..359: note = Variant of oxalate decarboxylase from Gemmata sp. SH-PL17
MGDPTFMNNVPDPVLSGKDLPTFKFELEKSKGKVIGKSSGKEATVVQLPISKGIAGVSMTLESGAMRELHWHATAAEWGFVLTGHVRTTVIDPQGAAETNDFGPGDVWYFPRGHGHMLECLGDKPAHFILIFDNGYFSEFGTFSITDWIGHTPKALLAKNFGLPESAFDGFPKKEVYFARGAVPPATPAAPLQGLKLPPLTHKYELLEQEPHKVFKGGREWRVDSSRFPISKTVTGVVLDLEPGALRELHWHPNADEWQYVIDGNISVTMFGSHGRYRTEQMEKGDVGYIPQGYGHSIENVGDRPCRVLIGFNTGNYQAIDLSQWIAGNPADVLATNFSKPTSLFEKFPKQDVFIAPGK

SEQ ID NO: 645 - DNA, 1077 bp, synthetic construct
  misc_feature 1..1077: note = Variant of oxalate decarboxylase from Gemmata sp. SH-PL17
  source 1..1077: mol_type = other DNA
atgggtgaccctacctttatgaacaatgtaccagaccctgtgctgtcgggcaaagatttgccgacgttcaagtttgaactggaaaagagcaagggccgggtcattgggaaaagttcgggaaaagaagcaaccgttgtccagttacctatctccaaaggcattgctggtgtgagcatgacccttgaaccgggtgcgatgcgcgaattgcactggcatgccacagcagcagagtgggggttcgtattaaccggccacgtccgtacgacggtgatcgatccacaaggtgcggccgaaaccaacgactttggaccgggcgacgtgtggtattttcctcgcggtcatgggcacatgctggaatgcctgggcgataaaccggcgcatttcattctgatcttcgataacggctacttctcagagtttggcaccttctctattactgactggatcggtcacacaccgaaagcgcttctcgccaagaactttggtctgcccgaatcggcttttgatgggtttcccaaaaaagaggtctattttgcacgtggcgcggttccaccagccacccctgcagcgcctttacagggactgaagctgccaccactcacgcataaatacgaactcctcgaacaagaacctcacaaagtttttaaaggtggtcgtgaatggcgcgtggatagctcgcgttttcccatttccaagactgtaaccggcgttgttcttgatttggaacccggcgcgttacgcgagcttcactggcatcctaatgctgacgagtggcaatatgtgatcgatggcaacattagtgtgacgatgttcggttctcatggccgttaccgcaccgaacagatggagaagggtgatgtcgggtatattccacaggggtatggccacagcatcgaaaatgttggagatcgtccttgtcgcgtcttgattggctttaacacaggtaactaccaagcgatcgacttatcacagtggattgcaggtaatcccgcggatgttcttgccacgaacttctccaaacccaccagcctctttgaaaagttcccaaaacaggacgtgtttattgctcctggcaag

SEQ ID NO: 646 - protein, 359 aa, synthetic construct
  REGION 1..359: note = Variant of oxalate decarboxylase from Gemmata sp. SH-PL17
MGDPTFMNNVPDPVLSGKDLPTFKFELEKSKGRVIGKSSGKEATVVQLPISKGIAGVSMTLEPGAMRELHWHATAAEWGFVLTGHVRTTVIDPQGAAETNDFGPGDVWYFPRGHGHMLECLGDKPAHFILIFDNGYFSEFGTFSITDWIGHTPKALLAKNFGLPESAFDGFPKKEVYFARGAVPPATPAAPLQGLKLPPLTHKYELLEQEPHKVFKGGREWRVDSSRFPISKTVTGVVLDLEPGALRELHWHPNADEWQYVIDGNISVTMFGSHGRYRTEQMEKGDVGYIPQGYGHSIENVGDRPCRVLIGFNTGNYQAIDLSQWIAGNPADVLATNFSKPTSLFEKFPKQDVFIAPGK

SEQ ID NO: 647 - DNA, 1077 bp, synthetic construct
  misc_feature 1..1077: note = Variant of oxalate decarboxylase from Gemmata sp. SH-PL17
  source 1..1077: mol_type = other DNA
atgggtgaccctacctttatgaacaatgtaccagaccctgtgctgtcgggcaaagatttgccgacgttcaagtttgaactggaaaagagcaagggcaaagtcattgggaaaagttcgggaaaagaagcaaccgttgtccagttacctatctccaaaggcattgctggtgtgagcatgacccttgaaccgggtgcgatgcgcgaattgcactggcatgccacagcagcagagtgggggttcgtattaaccggccacgtccgtacgacggtgatcgatccacaaggtgcggccgaaaccaacgactttggaccgggcgacgtgtggtattttcctcgcggtcatgggcacatgctggaatgcctgggcgataaaccggcgcatttcattctgatcttcgataacggctacttctcagagtttggcaccttctctattactgactggatcggtcacacaccgaaagcgcttctcgccaagaactttggtctgcccgaatcggcttttgatgggtttcccaaaaaagaggtctattttgcacgtggcgcggttccaccagccacccctgcagcgcctttacagggactgaagctgccaccactcacgcataaatacgaactcctcgaacaagaacctcacaaagtttttaaaggtggtcgtgaatggcgcgtggatagctcgcgttttcccatttccaagactgtaaccggcgttgttcttgatttggaacccggcgcgttacgcgagcttcactggcatcctaatgctgacgagtggcaatatgtgatcgatggcaacattagtgtgacgatgttcggttctcatggccgttaccgcaccgaacagatggagaagggtgatgtcgggtatattccacaggggtatggccacagcatcgaaaatgttggagatcgtccttgtcgcgtcttgattggctttaacacaggtaactaccaagcgatcgacttatcacagtggattgcaggtaatcccgcggatgttcttgccacgaacttctccaaacccaccagcctctttgaaaagttcccaaaacatgacgtgtttattgctcctggcaag

SEQ ID NO: 648 - protein, 359 aa, synthetic construct
  REGION 1..359: note = Variant of oxalate decarboxylase from Gemmata sp. SH-PL17
MGDPTFMNNVPDPVLSGKDLPTFKFELEKSKGKVIGKSSGKEATVVQLPISKGIAGVSMTLEPGAMRELHWHATAAEWGFVLTGHVRTTVIDPQGAAETNDFGPGDVWYFPRGHGHMLECLGDKPAHFILIFDNGYFSEFGTFSITDWIGHTPKALLAKNFGLPESAFDGFPKKEVYFARGAVPPATPAAPLQGLKLPPLTHKYELLEQEPHKVFKGGREWRVDSSRFPISKTVTGVVLDLEPGALRELHWHPNADEWQYVIDGNISVTMFGSHGRYRTEQMEKGDVGYIPQGYGHSIENVGDRPCRVLIGFNTGNYQAIDLSQWIAGNPADVLATNFSKPTSLFEKFPKHDVFIAPGK

SEQ ID NO: 649 - DNA, 1077 bp, synthetic construct
  misc_feature 1..1077: note = Variant of oxalate decarboxylase from Gemmata sp. SH-PL17
  source 1..1077: mol_type = other DNA
atgggtgaccctacctttatgaacaatgtaccagaccctgtgctgtcgggcaaagatttgccgacgttcaagtttgaactggaaaagagcaagggcaaagtcattgggaaaagttcgggaaaagaagcaaccgttgtccagttacctatctccaaaggcattgctggtgtgagcatgacccttgaaccgggtgcgatgcgcgaattgcactggcatgccacagcagcagagtgggggttcgtattaaccggccacgtccgtacgacggtgatcgatccacaaggtgcggccgaaaccaacgactttggaccgggcgacgtgtggtattttcctcgcggtcatgggcacatgctggaatgcctgggcgataaaccggcgcatttcattctgatcttcgataacggctacttctcagagtttggcaccttctctattactgactggatcggtcacacaccgaaagcgcttctcgccaagaactttggtctgcccgaatcggcttttgatgggtttcccaaaaaagaggtctattttgcacgtggcgcggttccaccagccacccctgcagcgcctttagggggactgaagctgccaccactcacgcataaatacgaactcctcgaacaagaacctcacaaagtttttaaaggtggtcgtgaatggcgcgtggatagctcgcgttttcccatttccaagactgtaaccggcgttgttcttgatttggaacccggcgcgttacgcgagcttcactggcatcctaatgctgacgagtggcaatatgtgatcgatggcaacattagtgtgacgatgttcggttctcatggccgttaccgcaccgaacagatggagaagggtgatgtcgggtatattccacaggggtatggccacagcatcgaaaatgttggagatcgtccttgtcgcgtcttgattggctttaacacaggtaactaccaagcgatcgacttatcacagtggattgcaggtaatcccgcggatgttcttgccacgaacttctccaaacccaccagcctctttgaaaagttcccaaaacaggacgtgtttattgctcctggcaag

SEQ ID NO: 650 - protein, 359 aa, synthetic construct
  REGION 1..359: note = Variant of oxalate decarboxylase from Gemmata sp. SH-PL17
MGDPTFMNNVPDPVLSGKDLPTFKFELEKSKGKVIGKSSGKEATVVQLPISKGIAGVSMTLEPGAMRELHWHATAAEWGFVLTGHVRTTVIDPQGAAETNDFGPGDVWYFPRGHGHMLECLGDKPAHFILIFDNGYFSEFGTFSITDWIGHTPKALLAKNFGLPESAFDGFPKKEVYFARGAVPPATPAAPLGGLKLPPLTHKYELLEQEPHKVFKGGREWRVDSSRFPISKTVTGVVLDLEPGALRELHWHPNADEWQYVIDGNISVTMFGSHGRYRTEQMEKGDVGYIPQGYGHSIENVGDRPCRVLIGFNTGNYQAIDLSQWIAGNPADVLATNFSKPTSLFEKFPKQDVFIAPGK

SEQ ID NO: 651 - DNA, 1077 bp, synthetic construct
  misc_feature 1..1077: note = Variant of oxalate decarboxylase from Gemmata sp. SH-PL17
  source 1..1077: mol_type = other DNA
atgggtgaccctacctttatgaacaatgtaccagaccctgtgctgtcgggcaaagatttgccgacgttcaagtttgaactggaaaagagcaagggcaaagtcattgggaaaagttcgggaaaagaagcaaccgttgtccagttacctatctccaaaggcattgctggtgtgagcatgacccttgaaccgggtgcgatgcgcgaattgcactggcatgccacagcagcagagtgggggttcgtattaaccggccacgtccgtacgacggtgatcgatccacaaggtgcggccgaaaccaacgactttggaccgggcgacgtgtggtattttcctcgcggtcatgggcacatgctggaatgcctgggcgataaatcggcgcatttcattctgatcttcgataacggctacttctcagagtttggcaccttctctattactgactggatcggtcacacaccgaaagcgcttctcgccaagaactttggtctgcccgaatcggcttttgatgggtttcccaaaaaagaggtctattttgcacgtggcgcggttccaccagccacccctgcagcgcctttacagggactgaagctgccaccactcacgcataaatacgaactcctcgaacaagaacctcacaaagtttttaaaggtggtcgtgaatggcgcgtggatagctcgcgttttcccatttccaagactgtaaccggcgttgttcttgatttggaacccggcgcgttacgcgagcttcactggcatcctaatgctgacgagtggcaatatgtgatcgatggcaacattagtgtgacgatgttcggttctcatggccgttaccgcaccgaacagatggagaagggtgatgtcgggtatattccacaggggtatggccacagcatcgaaaatgttggagatcgtccttgtcgcgtcttgattggctttaacacaggtaactaccaagcgatcgacttatcacagtggattgcaggtaatcccgcggatgttcttgccacgaacttctccaaacccaccagcctctttgaaaagttcccaaaacaggacgtgtttattgctcctggcaag

SEQ ID NO: 652 - protein, 359 aa, synthetic construct
  REGION 1..359: note = Variant of oxalate decarboxylase from Gemmata sp. SH-PL17
MGDPTFMNNVPDPVLSGKDLPTFKFELEKSKGKVIGKSSGKEATVVQLPISKGIAGVSMTLEPGAMRELHWHATAAEWGFVLTGHVRTTVIDPQGAAETNDFGPGDVWYFPRGHGHMLECLGDKSAHFILIFDNGYFSEFGTFSITDWIGHTPKALLAKNFGLPESAFDGFPKKEVYFARGAVPPATPAAPLQGLKLPPLTHKYELLEQEPHKVFKGGREWRVDSSRFPISKTVTGVVLDLEPGALRELHWHPNADEWQYVIDGNISVTMFGSHGRYRTEQMEKGDVGYIPQGYGHSIENVGDRPCRVLIGFNTGNYQAIDLSQWIAGNPADVLATNFSKPTSLFEKFPKQDVFIAPGK

SEQ ID NO: 653 - DNA, 1077 bp, synthetic construct
  misc_feature 1..1077: note = Variant of oxalate decarboxylase from Gemmata sp. SH-PL17
  source 1..1077: mol_type = other DNA
atgggtgaccctacctttatgaacaatgtaccagaccctgtgctgtcgggcaaagatttgccgacgttcaagtttgaactggaaaagagcaagggcaaagtcattgggaaaagttcgggaaaagaagcaaccgttgtccagttacctatctccaaaggcattgctggtgtgagcatgacccttgaaccgggtgcgatgcgcgaattgcactggcatgccacagcagcagagtgggggttcgtattaaccggccacgtccgtacgacggtgatcgatccacaaggtgcggccgaaaccaacgactttggaccgggcgacgtgtggtattttcctcgcggtcatgggcacatgctggaatgcctgggcgataaaccggcgcatttcattctgatcttcgataacggctacttctcagagtttggcaccttctctattactgactggatcggtcacacaccgaaagcgcttctcgccaagaactttggtctgcccgaatcggcttttgatgggtttcccaaaaaagaggtctattttgcacgtggcgcggttccaccagccacccctgcagcgcctttacagggactgaagctgccaccactcacgcataaatacgaactcctcgaacaagaacctcacaaagtttttaaaggtggtcgtgaatggcgcgtggatagctcgcgttttcccatttccaagactgtaaccggcgttgttcttgatttggaacccggcgcgttacgcgagcttcactggcatcctaatgctgacgagtggcaatatgtgatcgatggcaacattagtgtgacgatgttcggttctcatggccgttaccgcaccgaacagatggagaagggtgatgtcgggtatattccacaggggtatggccacagcatcgaaaatgttggagatcgtccttgtcgcgtcttgattggctttaacagtggtaactaccaagcgatcgacttatcacagtggattgcaggtaatcccgcggatgttcttgccacgaacttctccaaacccaccagcctctttgaaaagttcccaaaacaggacgtgtttattgctcctggcaag

SEQ ID NO: 654 - protein, 359 aa, synthetic construct
  REGION 1..359: note = Variant of oxalate decarboxylase from Gemmata sp. SH-PL17
MGDPTFMNNVPDPVLSGKDLPTFKFELEKSKGKVIGKSSGKEATVVQLPISKGIAGVSMTLEPGAMRELHWHATAAEWGFVLTGHVRTTVIDPQGAAETNDFGPGDVWYFPRGHGHMLECLGDKPAHFILIFDNGYFSEFGTFSITDWIGHTPKALLAKNFGLPESAFDGFPKKEVYFARGAVPPATPAAPLQGLKLPPLTHKYELLEQEPHKVFKGGREWRVDSSRFPISKTVTGVVLDLEPGALRELHWHPNADEWQYVIDGNISVTMFGSHGRYRTEQMEKGDVGYIPQGYGHSIENVGDRPCRVLIGFNSGNYQAIDLSQWIAGNPADVLATNFSKPTSLFEKFPKQDVFIAPGK

SEQ ID NO: 655 - DNA, 1077 bp, synthetic construct
  misc_feature 1..1077: note = Variant of oxalate decarboxylase from Gemmata sp. SH-PL17
  source 1..1077: mol_type = other DNA
atgggtgaccctacctttatgaacaatgtaccagaccctgtgctgtcgggcaaagatttgccgacgttcaagtttgaactggaaaagagcaagggcaaagtcattgggaaaagttcgggaaaagaagcaaccgttgtccagttacctatctccaaaggcattgctggtgtgagcatgacccttgaaccgggtgcgatgcgcgaattgcactggcatgccacagcagcagagtgggggttcgtattaaccggccacgtccgtacgacggtgatcgatccacaaggtgcggccgaaaccaacgactttggaccgggcgacgtgtggtattttcctcgcggtcatgggcacatgctggaatgcctgggcgataaaccggcgcatttcattctgatcttcgataacggctacttctcagagtttggcaccttctctattactgactggatcggtcacacaccgaaagcgcttctcgccaagaactttggtctgcccgaatcggcttttgatgggtttcccaaaaaagaggtctattttgcacgtggcgcggttccaccagccaggcctgcagcgcctttacagggactgaagctgccaccactcacgcataaatacgaactcctcgaacaagaacctcacaaagtttttaaaggtggtcgtgaatggcgcgtggatagctcgcgttttcccatttccaagactgtaaccggcgttgttcttgatttggaacccggcgcgttacgcgagcttcactggcatcctaatgctgacgagtggcaatatgtgatcgatggcaacattagtgtgacgatgttcggttctcatggccgttaccgcaccgaacagatggagaagggtgatgtcgggtatattccacaggggtatggccacagcatcgaaaatgttggagatcgtccttgtcgcgtcttgattggctttaacacaggtaactaccaagcgatcgacttatcacagtggattgcaggtaatcccgcggatgttcttgccacgaacttctccaaacccaccagcctctttgaaaagttcccaaaacaggacgtgtttattgctcctggcaag

SEQ ID NO: 656 - protein, 359 aa, synthetic construct
  REGION 1..359: note = Variant of oxalate decarboxylase from Gemmata sp. SH-PL17
MGDPTFMNNVPDPVLSGKDLPTFKFELEKSKGKVIGKSSGKEATVVQLPISKGIAGVSMTLEPGAMRELHWHATAAEWGFVLTGHVRTTVIDPQGAAETNDFGPGDVWYFPRGHGHMLECLGDKPAHFILIFDNGYFSEFGTFSITDWIGHTPKALLAKNFGLPESAFDGFPKKEVYFARGAVPPARPAAPLQGLKLPPLTHKYELLEQEPHKVFKGGREWRVDSSRFPISKTVTGVVLDLEPGALRELHWHPNADEWQYVIDGNISVTMFGSHGRYRTEQMEKGDVGYIPQGYGHSIENVGDRPCRVLIGFNTGNYQAIDLSQWIAGNPADVLATNFSKPTSLFEKFPKQDVFIAPGK

SEQ ID NO: 657 - DNA, 1077 bp, synthetic construct
  misc_feature 1..1077: note = Variant of oxalate decarboxylase from Gemmata sp. SH-PL17
  source 1..1077: mol_type = other DNA
atgggtgaccctacctttatgaacaatgtaccagaccctgtgctgtcgggcaaagatttgccgacgttcaagtttgaactggaaaagagcaagggcaaagtcattgggaaaagttcgggaaaagaagcaaccgttgtccagttacctatctccaaaggcattgctggtgtgagcatgacccttgaaccgggtgcgatgcgcgaattgcactggcatgccacagcagcagagtgggggttcgtattaaccggccacgtccgtacgacggtgatcgatccacaaggtgcggccgaaaccaacgactttggaccgggcgacgtgtggtattttcctcgcggtcatgggcacatgctggaatgcctgggcgataaaccggcgcatttcattctgatcttcgataacggctacttctcagagtttggcaccttctctattactgactggatcggtcacacaccgaaagcgcttctcgccaagaactttggtctgcccgaatcggcttttgatgggtttcccaaaaaagaggtctattttgcacgtggcgcggttccaccagccacccctgcagcgcctttacagggactgaagctgccaccactcacgcataaatacgaactcctcgaacaagaacctcacaaagtttttaaaggtggtcgtgaatggcgcgtggatagctcgcgttttcccatttccaagactgtaaccggcgttgttcttgatttggaacccggcgcgttacgcgagcttcactggcatcctaatgctgacgagtggcaatatgtgatcgatggcaacattagtgtgacgatgttcggttctcatggccgttaccgcaccgaacagatggagaagggtgatgtcgggtatattccacaggggtatggccacagcatcgaaaatgttggaacgcgtccttgtcgcgtcttgattggctttaacacaggtaactaccaagcgatcgacttatcacagtggattgcaggtaatcccgcggatgttcttgccacgaacttctccaaacccaccagcctctttgaaaagttcccaaaacaggacgtgtttattgctcctggcaag

SEQ ID NO: 658 - protein, 359 aa, synthetic construct
  REGION 1..359: note = Variant of oxalate decarboxylase from Gemmata sp. SH-PL17
MGDPTFMNNVPDPVLSGKDLPTFKFELEKSKGKVIGKSSGKEATVVQLPISKGIAGVSMTLEPGAMRELHWHATAAEWGFVLTGHVRTTVIDPQGAAETNDFGPGDVWYFPRGHGHMLECLGDKPAHFILIFDNGYFSEFGTFSITDWIGHTPKALLAKNFGLPESAFDGFPKKEVYFARGAVPPATPAAPLQGLKLPPLTHKYELLEQEPHKVFKGGREWRVDSSRFPISKTVTGVVLDLEPGALRELHWHPNADEWQYVIDGNISVTMFGSHGRYRTEQMEKGDVGYIPQGYGHSIENVGTRPCRVLIGFNTGNYQAIDLSQWIAGNPADVLATNFSKPTSLFEKFPKQDVFIAPGK

SEQ ID NO: 659 - DNA, 1077 bp, synthetic construct
  misc_feature 1..1077: note = Variant of oxalate decarboxylase from Gemmata sp. SH-PL17
  source 1..1077: mol_type = other DNA
atgggtgaccctacctttatgaacaatgtaccagaccctgtgctgtcgggcaaagatttgccgacgttcaagtttgaactggaaaagagcaagggcaaagtcattgggaaaagttcgggaaaagaagcaaccgttgtccagttacctatctccaaaggcattgctggtgtgagcatgacccttgaaccgggtgcgatgcgcgaattgcactggcatgccacagcagcagagtgggggttcgtattaaccggccacgtccgtacgacggtgatcgatccacaaggtgcggccgaaaccaacgactttgttccgggcgacgtgtggtattttcctcgcggtcatgggcacatgctggaatgcctgggcgataaaccggcgcatttcattctgatcttcgataacggctacttctcagagtttggcaccttctctattactgactggatcggtcacacaccgaaagcgcttctcgccaagaactttggtctgcccgaatcggcttttgatgggtttcccaaaaaagaggtctattttgcacgtggcgcggttccaccagccacccctgcagcgcctttacagggactgaagctgccaccactcacgcataaatacgaactcctcgaacaagaacctcacaaagtttttaaaggtggtcgtgaatggcgcgtggatagctcgcgttttcccatttccaagactgtaaccggcgttgttcttgatttggaacccggcgcgttacgcgagcttcactggcatcctaatgctgacgagtggcaatatgtgatcgatggcaacattagtgtgacgatgttcggttctcatggccgttaccgcaccgaacagatggagaagggtgatgtcgggtatattccacaggggtatggccacagcatcgaaaatgttggagatcgtccttgtcgcgtcttgattggctttaacacaggtaactaccaagcgatcgacttatcacagtggattgcaggtaatcccgcggatgttcttgccacgaacttctccaaacccaccagcctctttgaaaagttcccaaaacaggacgtgtttattgctcctggcaag

SEQ ID NO: 660 - protein, 359 aa, synthetic construct
  REGION 1..359: note = Variant of oxalate decarboxylase from Gemmata sp. SH-PL17
MGDPTFMNNVPDPVLSGKDLPTFKFELEKSKGKVIGKSSGKEATVVQLPISKGIAGVSMTLEPGAMRELHWHATAAEWGFVLTGHVRTTVIDPQGAAETNDFVPGDVWYFPRGHGHMLECLGDKPAHFILIFDNGYFSEFGTFSITDWIGHTPKALLAKNFGLPESAFDGFPKKEVYFARGAVPPATPAAPLQGLKLPPLTHKYELLEQEPHKVFKGGREWRVDSSRFPISKTVTGVVLDLEPGALRELHWHPNADEWQYVIDGNISVTMFGSHGRYRTEQMEKGDVGYIPQGYGHSIENVGDRPCRVLIGFNTGNYQAIDLSQWIAGNPADVLATNFSKPTSLFEKFPKQDVFIAPGK

SEQ ID NO: 661 - DNA, 1077 bp, synthetic construct
  misc_feature 1..1077: note = Variant of oxalate decarboxylase from Gemmata sp. SH-PL17
  source 1..1077: mol_type = other DNA
atgggtgaccctacctttatgaacaatgtaccagaccctgtgctgtcgggcaaagatttgccgacgttcaagtttgaactggaaaagagcaagggcaaagtcattgggaaaagttcgggaaaagaagcaaccgttgtccagttacctatctccaaaggcattgctggtgtgagcatgacccttgaaccgggtgcgatgcgcgaattgcactggcatgccacagcagcagagtgggggttcgtattaaccggccacgtccgtacgacggtgatcgatccacaaggtgcggccgaaaccaacgactttcagccgggcgacgtgtggtattttcctcgcggtcatgggcacatgctggaatgcctgggcgataaaccggcgcatttcattctgatcttcgataacggctacttctcagagtttggcaccttctctattactgactggatcggtcacacaccgaaagcgcttctcgccaagaactttggtctgcccgaatcggcttttgatgggtttcccaaaaaagaggtctattttgcacgtggcgcggttccaccagccacccctgcagcgcctttacagggactgaagctgccaccactcacgcataaatacgaactcctcgaacaagaacctcacaaagtttttaaaggtggtcgtgaatggcgcgtggatagctcgcgttttcccatttccaagactgtaaccggcgttgttcttgatttggaacccggcgcgttacgcgagcttcactggcatcctaatgctgacgagtggcaatatgtgatcgatggcaacattagtgtgacgatgttcggttctcatggccgttaccgcaccgaacagatggagaagggtgatgtcgggtatattccacaggggtatggccacagcatcgaaaatgttggagatcgtccttgtcgcgtcttgattggctttaacacaggtaactaccaagcgatcgacttatcacagtggattgcaggtaatcccgcggatgttcttgccacgaacttctccaaacccaccagcctctttgaaaagttcccaaaacaggacgtgtttattgctcctggcaag

SEQ ID NO: 662 - protein, 359 aa, synthetic construct
  REGION 1..359: note = Variant of oxalate decarboxylase from Gemmata sp. SH-PL17
MGDPTFMNNVPDPVLSGKDLPTFKFELEKSKGKVIGKSSGKEATVVQLPISKGIAGVSMTLEPGAMRELHWHATAAEWGFVLTGHVRTTVIDPQGAAETNDFQPGDVWYFPRGHGHMLECLGDKPAHFILIFDNGYFSEFGTFSITDWIGHTPKALLAKNFGLPESAFDGFPKKEVYFARGAVPPATPAAPLQGLKLPPLTHKYELLEQEPHKVFKGGREWRVDSSRFPISKTVTGVVLDLEPGALRELHWHPNADEWQYVIDGNISVTMFGSHGRYRTEQMEKGDVGYIPQGYGHSIENVGDRPCRVLIGFNTGNYQAIDLSQWIAGNPADVLATNFSKPTSLFEKFPKQDVFIAPGK

SEQ ID NO: 663 - DNA, 1077 bp, synthetic construct
  misc_feature 1..1077: note = Variant of oxalate decarboxylase from Gemmata sp. SH-PL17
  source 1..1077: mol_type = other DNA
atgggtgaccctacctttatgaacaatgtaccagaccctgtgctgtcgggcaaagatttgccgacgttcaagtttgaactggaaaagagcaagggcaaagtcattgggaaaagttcgggaaaagaagcaaccgttgtccagttacctatctccaaaggcattgctggtgtgagcatgacccttgaaccgggtgcgatgcgcgaattgcactggcatgccacagcagcagagtgggggttcgtattaaccggccacgtccgtacgacggtgatcgatccacaaggtgcggccgaaaccaacgactttggaccgggcgacgtgtggtattttcctcgcggtcatgggcacatgctggaatgcctgggcgataaaccggcgcatttcattctgatcttcgataacggctacttctcagagtttggcaccttctctattactgactggatcggtcacacaccgaaagttcttctcgccaagaactttggtctgcccgaatcggcttttgatgggtttcccaaaaaagaggtctattttgcacgtggcgcggttccaccagccacccctgcagcgcctttacagggactgaagctgccaccactcacgcataaatacgaactcctcgaacaagaacctcacaaagtttttaaaggtggtcgtgaatggcgcgtggatagctcgcgttttcccatttccaagactgtaaccggcgttgttcttgatttggaacccggcgcgttacgcgagcttcactggcatcctaatgctgacgagtggcaatatgtgatcgatggcaacattagtgtgacgatgttcggttctcatggccgttaccgcaccgaacagatggagaagggtgatgtcgggtatattccacaggggtatggccacagcatcgaaaatgttggagatcgtccttgtcgcgtcttgattggctttaacacaggtaactaccaagcgatcgacttatcacagtggattgcaggtaatcccgcggatgttcttgccacgaacttctccaaacccaccagcctctttgaaaagttcccaaaacaggacgtgtttattgctcctggcaag

SEQ ID NO: 664 - protein, 359 aa, synthetic construct
  REGION 1..359: note = Variant of oxalate decarboxylase from Gemmata sp. SH-PL17
MGDPTFMNNVPDPVLSGKDLPTFKFELEKSKGKVIGKSSGKEATVVQLPISKGIAGVSMTLEPGAMRELHWHATAAEWGFVLTGHVRTTVIDPQGAAETNDFGPGDVWYFPRGHGHMLECLGDKPAHFILIFDNGYFSEFGTFSITDWIGHTPKVLLAKNFGLPESAFDGFPKKEVYFARGAVPPATPAAPLQGLKLPPLTHKYELLEQEPHKVFKGGREWRVDSSRFPISKTVTGVVLDLEPGALRELHWHPNADEWQYVIDGNISVTMFGSHGRYRTEQMEKGDVGYIPQGYGHSIENVGDRPCRVLIGFNTGNYQAIDLSQWIAGNPADVLATNFSKPTSLFEKFPKQDVFIAPGK

SEQ ID NO: 665 - DNA, 1077 bp, synthetic construct
  misc_feature 1..1077: note = Variant of oxalate decarboxylase from Gemmata sp. SH-PL17
  source 1..1077: mol_type = other DNA
atgggtgaccctacctttatgaacaatgtaccagaccctgtgctgtcgggcaaagatttgccgacgttcaagtttgaactggaaaagagcaagggcaaagtcattgggaaaagttcgggaaaagaagcaaccgttgtccagttacctatctccaaaggcattgctggtgtgagcatgacccttgaaccgggtgcgatgcgcgaattgcactggcatgccacagcagcagagtgggggttcgtattaaccggccacgtccgtacgacggtgatcgatccacaaggtgcggccgaaaccaacgactttggaccgggcgacgtgtggtattttcctcgcggtcatgggcacatgctggaatgcctgggcgataaaccggcgcatttcattctgatcttcgataacggctacttctcagagtttggcaccttctctattactgactggatcggtcacacaccgaaagcgcttctcgccaagaactttggtctgcgggaatcggcttttgatgggtttcccaaaaaagaggtctattttgcacgtggcgcggttccaccagccacccctgcagcgcctttacagggactgaagctgccaccactcacgcataaatacgaactcctcgaacaagaacctcacaaagtttttaaaggtggtcgtgaatggcgcgtggatagctcgcgttttcccatttccaagactgtaaccggcgttgttcttgatttggaacccggcgcgttacgcgagcttcactggcatcctaatgctgacgagtggcaatatgtgatcgatggcaacattagtgtgacgatgttcggttctcatggccgttaccgcaccgaacagatggagaagggtgatgtcgggtatattccacaggggtatggccacagcatcgaaaatgttggagatcgtccttgtcgcgtcttgattggctttaacacaggtaactaccaagcgatcgacttatcacagtggattgcaggtaatcccgcggatgttcttgccacgaacttctccaaacccaccagcctctttgaaaagttcccaaaacaggacgtgtttattgctcctggcaag

SEQ ID NO: 666 - protein, 359 aa, synthetic construct
  REGION 1..359: note = Variant of oxalate decarboxylase from Gemmata sp. SH-PL17
MGDPTFMNNVPDPVLSGKDLPTFKFELEKSKGKVIGKSSGKEATVVQLPISKGIAGVSMTLEPGAMRELHWHATAAEWGFVLTGHVRTTVIDPQGAAETNDFGPGDVWYFPRGHGHMLECLGDKPAHFILIFDNGYFSEFGTFSITDWIGHTPKALLAKNFGLRESAFDGFPKKEVYFARGAVPPATPAAPLQGLKLPPLTHKYELLEQEPHKVFKGGREWRVDSSRFPISKTVTGVVLDLEPGALRELHWHPNADEWQYVIDGNISVTMFGSHGRYRTEQMEKGDVGYIPQGYGHSIENVGDRPCRVLIGFNTGNYQAIDLSQWIAGNPADVLATNFSKPTSLFEKFPKQDVFIAPGK

SEQ ID NO: 667 - DNA, 1077 bp, synthetic construct
  misc_feature 1..1077: note = Variant of oxalate decarboxylase from Gemmata sp. SH-PL17
  source 1..1077: mol_type = other DNA
atgggtgaccctacctttatgaacaatgtaccagaccctgtgctgtcgggcaaagatttgccgacgttcaagtttgaactggaaaagagcaagggcaaagtcattgggaaaagttcgggaaaagaagcaaccgttgtccagttacctatctccaaaggcattgctggtgtgagcatgacccttgaaccgggtgcgatgcgcgaattgcactggcatgccacagcagcagagtgggggttcgtattaaccggccacgtccgtacgacggtgatcgatccacaaggtgcggccgaaaccaacgactttggaccgggcgacgtgtggtattttcctcgcggtcatgggcacatgctggaatgcctgggcgataaaccggcgcatttcattctgatcttcgataacggctacttctcagagtttggcaccttctctattactgactggatcggtcacacaagtaaagcgcttctcgccaagaactttggtctgcccgaatcggcttttgatgggtttcccaaaaaagaggtctattttgcacgtggcgcggttccaccagccacccctgcagcgcctttacagggactgaagctgccaccactcacgcataaatacgaactcctcgaacaagaacctcacaaagtttttaaaggtggtcgtgaatggcgcgtggatagctcgcgttttcccatttccaagactgtaaccggcgttgttcttgatttggaacccggcgcgttacgcgagcttcactggcatcctaatgctgacgagtggcaatatgtgatcgatggcaacattagtgtgacgatgttcggttctcatggccgttaccgcaccgaacagatggagaagggtgatgtcgggtatattccacaggggtatggccacagcatcgaaaatgttggagatcgtccttgtcgcgtcttgattggctttaacacaggtaactaccaagcgatcgacttatcacagtggattgcaggtaatcccgcggatgttcttgccacgaacttctccaaacccaccagcctctttgaaaagttcccaaaacaggacgtgtttattgctcctggcaag

SEQ ID NO: 668 - protein, 359 aa, synthetic construct
  REGION 1..359: note = Variant of oxalate decarboxylase from Gemmata sp. SH-PL17
MGDPTFMNNVPDPVLSGKDLPTFKFELEKSKGKVIGKSSGKEATVVQLPISKGIAGVSMTLEPGAMRELHWHATAAEWGFVLTGHVRTTVIDPQGAAETNDFGPGDVWYFPRGHGHMLECLGDKPAHFILIFDNGYFSEFGTFSITDWIGHTSKALLAKNFGLPESAFDGFPKKEVYFARGAVPPATPAAPLQGLKLPPLTHKYELLEQEPHKVFKGGREWRVDSSRFPISKTVTGVVLDLEPGALRELHWHPNADEWQYVIDGNISVTMFGSHGRYRTEQMEKGDVGYIPQGYGHSIENVGDRPCRVLIGFNTGNYQAIDLSQWIAGNPADVLATNFSKPTSLFEKFPKQDVFIAPGK

SEQ ID NO: 669 - DNA, 1077 bp, synthetic construct
  misc_feature 1..1077: note = Variant of oxalate decarboxylase from Gemmata sp. SH-PL17
  source 1..1077: mol_type = other DNA
atgggtgaccctacctttatgaacaatgtaccagaccctgtgctgtcgggcaaagatttgccgacgttcaagtttgaactggaaaagagcaagggcaaagtcattgggaaaagttcgggaaaagaagcaaccgttgtccagttacctatctccaaaggcattgctggtgtgagcatgacccttgaaccgggtgcgatgcgcgaattgcactggcatgccacagcagcagagtgggggttcgtattaaccggccacgtccgtacgacggtgatcgatccacaaggtgcggccgaaaccaacgactttggaccgggcgacgtgtggtattttcctcgcggtcatgggcacatgctggaatgcctgggcgataaaccggcgcatttcattctgatcttcgataacggctacttctcagagtttggcaccttctctattactgactggatcggtcacacaccgaaagcgcttctcgccaagaactttggtctgcccgaatcggcttttgatgggtttcccaaaaaagaggtctattttgcacgtggcgcggttccaccagccacccctgcagcgcctttacagggactgaagctgccaccactcacgcataaatacgaactcctcgaacaagaacctcacaaagtttttaaaggtggtcgtgaatggcgcgtggatagctcgcgttttcccatttccaagactgtaaccggcgttgttcttgatttggaacccggcgcgttacgcgagcttcactggcatcctaatgctgacgagtggcaatatgtgatcgatggcaacattagtgtgacgatgttcggttctcatggccgttaccgcaccgaacagatggagaagggtgatgtcgggtatattccacaggggtatggccacagcatcgaaaatgttggagatcgtccttgtcgcgtcttgattggctttaacacaggtaactaccaagcgatcgacttatcacagtggattgcaggtaatcccgcggatgttcttgccacgaacttctccaaacccaccagcctctttgaaaagttcccaaaacaggacgtgtttattgctcctggcaag

SEQ ID NO: 670 - protein, 359 aa, synthetic construct
  REGION 1..359: note = Variant of oxalate decarboxylase from Gemmata sp. SH-PL17
MGDPTFMNNVPDPVLSGKDLPTFKFELEKSKGKVIGKSSGKEATVVQLPISKGIAGVSMTLEPGAMRELHWHATAAEWGFVLTGHVRTTVIDPQGAAETNDFGPGDVWYFPRGHGHMLECLGDKPAHFILIFDNGYFSEFGTFSITDWIGHTPKALLAKNFGLPESAFDGFPKKEVYFARGAVPPATPAAPLQGLKLPPLTHKYELLEQEPHKVFKGGREWRVDSSRFPISKTVTGVVLDLEPGALRELHWHPNADEWQYVIDGNISVTMFGSHGRYRTEQMEKGDVGYIPQGYGHSIENVGDRPCRVLIGFNTGNYQAIDLSQWIAGNPADVLATNFSKPTSLFEKFPKQDVFIAPGK

SEQ ID NO: 671 - DNA, 1077 bp, synthetic construct
  misc_feature 1..1077: note = Variant of oxalate decarboxylase from Gemmata sp. SH-PL17
  source 1..1077: mol_type = other DNA
atgggtgaccctacctttatgaacaatgtaccagaccctgtgctgtcgggcaaagatttgccgacgttcaagtttgaactggaaaagagcaagggcaaagtcattgggcggagttcgggaaaagaagcaaccgttgtccagttacctatctccaaaggcattgctggtgtgagcatgacccttgaaccgggtgcgatgcgcgaattgcactggcatgccacagcagcagagtgggggttcgtattaaccggccacgtccgtacgacggtgatcgatccacaaggtgcggccgaaaccaacgactttggaccgggcgacgtgtggtattttcctcgcggtcatgggcacatgctggaatgcctgggcgataaaccggcgcatttcattctgatcttcgataacggctacttctcagagtttggcaccttctctattactgactggatcggtcacacaccgaaagcgcttctcgccaagaactttggtctgcccgaatcggcttttgatgggtttcccaaaaaagaggtctattttgcacgtggcgcggttccaccagccacccctgcagcgcctttacagggactgaagctgccaccactcacgcataaatacgaactcctcgaacaagaacctcacaaagtttttaaaggtggtcgtgaatggcgcgtggatagctcgcgttttcccatttccaagactgtaaccggcgttgttcttgatttggaacccggcgcgttacgcgagcttcactggcatcctaatgctgacgagtggcaatatgtgatcgatggcaacattagtgtgacgatgttcggttctcatggccgttaccgcaccgaacagatggagaagggtgatgtcgggtatattccacaggggtatggccacagcatcgaaaatgttggagatcgtccttgtcgcgtcttgattggctttaacacaggtaactaccaagcgatcgacttatcacagtggattgcaggtaatcccgcggatgttcttgccacgaacttctccaaacccaccagcctctttgaaaagttcccaaaacaggacgtgtttattgctcctggcaag

SEQ ID NO: 672 - protein, 359 aa, synthetic construct
  REGION 1..359: note = Variant of oxalate decarboxylase from Gemmata sp. SH-PL17
MGDPTFMNNVPDPVLSGKDLPTFKFELEKSKGKVIGRSSGKEATVVQLPISKGIAGVSMTLEPGAMRELHWHATAAEWGFVLTGHVRTTVIDPQGAAETNDFGPGDVWYFPRGHGHMLECLGDKPAHFILIFDNGYFSEFGTFSITDWIGHTPKALLAKNFGLPESAFDGFPKKEVYFARGAVPPATPAAPLQGLKLPPLTHKYELLEQEPHKVFKGGREWRVDSSRFPISKTVTGVVLDLEPGALRELHWHPNADEWQYVIDGNISVTMFGSHGRYRTEQMEKGDVGYIPQGYGHSIENVGDRPCRVLIGFNTGNYQAIDLSQWIAGNPADVLATNFSKPTSLFEKFPKQDVFIAPGK

SEQ ID NO: 673 - DNA, 1077 bp, synthetic construct
  misc_feature 1..1077: note = Variant of oxalate decarboxylase from Gemmata sp. SH-PL17
  source 1..1077: mol_type = other DNA
atgggtgaccctacctttatgaacaatgtaccagaccctgtgctgtcgggcaaagatttgccgacgttcaagtttgaactggaaaagagcaagggcaaagtcattgggaaaagttcgggaaaagaagcaaccgttgtccagttacctatctccaaaggcattgctggtgtgagcatgacccttgaaccgggtgcgatgcgcgaattgcactggcatgccacagcagcagagtgggggttcgtattaaccggccacgtccgtacgacggtgatcgatccacaaggtgcggccgaaaccaacgactttggaccgggcgacgtgtggtattttcctcgcggtcatgggcacatgctggaatgcctgggcgataaaccggcgcatttcattctgatcttcgataacggctacttctcagagtttggcaccttctctattactgactggatcggtcacacaccgaaagcgcttctcgccaagaactttggtctgcccgaatcggcttttgatgggtttcccaaaaaagaggtctattttgcacgtggcgcggttccaccagccacccctgcagcgcctttacagggactgaagctgccaccactcacgcataaatacgaactcctcgaacaagaacctcacaaagtttttaaaggtggtcgtgaatggcgcgtggatagctcgcgttttcccatttccaagactgtaaccggcgttgttcttgatttggaacccggcgcgttacgcgagcttcactggcatcctaatgctgacgagtggcaatatgtgatcgatggcaacattagtgtgacgatgttcggttctcatggccgttaccgcaccgaacagatggagaagggtgatgtcgggtatattccacaggggtatggccacagcatcgaaaatgttggagatcgtccttgtcgcgtcttgattggctttaacacaggtaactaccaagcgatcgacttatcacagtggattgcaggtaatcccgcggatgttcttgccacgaacttctccaaacccaccagcctctttcagaagttcccaaaacaggacgtgtttattgctcctggcaag

SEQ ID NO: 674 - protein, 359 aa, synthetic construct
  REGION 1..359: note = Variant of oxalate decarboxylase from Gemmata sp. SH-PL17
MGDPTFMNNVPDPVLSGKDLPTFKFELEKSKGKVIGKSSGKEATVVQLPISKGIAGVSMTLEPGAMRELHWHATAAEWGFVLTGHVRTTVIDPQGAAETNDFGPGDVWYFPRGHGHMLECLGDKPAHFILIFDNGYFSEFGTFSITDWIGHTPKALLAKNFGLPESAFDGFPKKEVYFARGAVPPATPAAPLQGLKLPPLTHKYELLEQEPHKVFKGGREWRVDSSRFPISKTVTGVVLDLEPGALRELHWHPNADEWQYVIDGNISVTMFGSHGRYRTEQMEKGDVGYIPQGYGHSIENVGDRPCRVLIGFNTGNYQAIDLSQWIAGNPADVLATNFSKPTSLFQKFPKQDVFIAPGK

SEQ ID NO: 675 - DNA, 1077 bp, synthetic construct
  misc_feature 1..1077: note = Variant of oxalate decarboxylase from Gemmata sp. SH-PL17
  source 1..1077: mol_type = other DNA
atgggtgaccctacctttatgaacaatgtaccagaccctgtgctgtcgggcaaagatttgccgacgttcaagtttgaactggaaaagagcaagggcaaagtcattgggaaaagttcgggaaaagaagcaaccgttgtccagttacctatctccaaaggcattgctggtgtgagcatgacccttgaaccgggtgcgatgcgcgaattgcactggcatgccacagcagcagagtgggggttcgtattaaccggccacgtccgtacgacggtgatcgatccacaaggtgcggccgaaaccaacgactttggaccgggcgacgtgtggtattttcctcgcggtcatgggcacatgctggaatgcctgggcgataaaccggcgcatttcattctgatcttcgataacggctacttctcagagtttggcaccttctctattactgactggatcggtcacacaccgaaagcgcttctcgccaagaactttggtctgcccgaatcggcttttgatgggtttcccaaaaaagaggtctattttgcacgtggcgcggttccaccagccacccctgcagcgcctttacagggactgaagctgccaccactcacgcataaatacgaactcctcgaacaagaacctcacaaagtttttaaaggtggtcgtgaatggcgcgtggatagctcgcgttttcccatttccaagactgtaaccggcgttgttcttgatttggaacccggcgcgttacgcgagcttcactggcatcctaatgctgacgagtggcaatatgtgatcgatggcaacattagtgtgacgatgttcggttctcatggccgttaccgcaccgaacagatggagaagggtgatgtcgggtatattccacaggggtatggccacagcatcgaaaatgttggagatcgtccttgtcgcgtcttgattggctttaacacaggtaactaccaagcgatcgacttatcacagtggattgcaggtaatcccgcggatgttcttgccacgaacttctccaaacccaccagcctctttggtaagttcccaaaacaggacgtgtttattgctcctggcaag

SEQ ID NO: 676 - protein, 359 aa, synthetic construct
  REGION 1..359: note = Variant of oxalate decarboxylase from Gemmata sp. SH-PL17
MGDPTFMNNVPDPVLSGKDLPTFKFELEKSKGKVIGKSSGKEATVVQLPISKGIAGVSMTLEPGAMRELHWHATAAEWGFVLTGHVRTTVIDPQGAAETNDFGPGDVWYFPRGHGHMLECLGDKPAHFILIFDNGYFSEFGTFSITDWIGHTPKALLAKNFGLPESAFDGFPKKEVYFARGAVPPATPAAPLQGLKLPPLTHKYELLEQEPHKVFKGGREWRVDSSRFPISKTVTGVVLDLEPGALRELHWHPNADEWQYVIDGNISVTMFGSHGRYRTEQMEKGDVGYIPQGYGHSIENVGDRPCRVLIGFNTGNYQAIDLSQWIAGNPADVLATNFSKPTSLFGKFPKQDVFIAPGK

SEQ ID NO: 677 - DNA, 1077 bp, synthetic construct
  misc_feature 1..1077: note = Variant of oxalate decarboxylase from Gemmata sp. SH-PL17
  source 1..1077: mol_type = other DNA
atgggtgaccctacctttatgaacaatgtaccagaccctgtgctgtcgggcaaagatttgccgacgttcaagtttgaactggaaaagagcaagggcaaagtcattgggaaaagttcgggaaaagaagcaaccgttgtccagttacctatctccaaaggcattgctggtgtgagcatgacccttgaaccgggtgcgatgcgcgaattgcactggcatgccacagcagcagagtgggggttcgtattaaccggccacgtccgtacgacggtgatcgatccacaaggtgcggccgaaaccaacgactttggaccgggcgacgtgtggtattttcctcgcggtcatgggcacatgctggaatgcctgggcgataaaccggcgcatttcattctgatcttcgataacggctacttctcagagtttggcaccttctctattactgactggatcggtcacacaccgaaagcgcttctcgccaagaactttggtctgcccgaatcggcttttgatgggtttcccaaaaaagaggtctattttgcacgtggcgcggttccaccagccacccctgcagcgcctttacagggactgaagctgccaccactcacgcataaatacgaactcctcgaacaagaacctcacaaagtttttaaaggtggtcgtgaatggcgcgtggatagctcgcgttttcccatttccaagactgtaaccggcgttgttcttgatttggaacccggcgcgttacgcgagcttcactggcatcctaatgctgacgagtggcaatatgtgatcgatggcaacattagtgtgacgatgttcggttctcatggccgttaccgcaccgaacagatggagaagggtgatgtcgggtatattccacaggggtatggccacagcatcgaaaatgttggagatcgtccttgtcgcgtcttgattggctttaacacaggtaactaccaagcgatcgacttatcacagtggattgcaggtaatcccgcggatgttcttgccacgaacttctccaaacccaccagcctctttgaaaagttcccaaaagcggacgtgtttattgctcctggcaag

SEQ ID NO: 678 - protein, 359 aa, synthetic construct
  REGION 1..359: note = Variant of oxalate decarboxylase from Gemmata sp. SH-PL17
MGDPTFMNNVPDPVLSGKDLPTFKFELEKSKGKVIGKSSGKEATVVQLPISKGIAGVSMTLEPGAMRELHWHATAAEWGFVLTGHVRTTVIDPQGAAETNDFGPGDVWYFPRGHGHMLECLGDKPAHFILIFDNGYFSEFGTFSITDWIGHTPKALLAKNFGLPESAFDGFPKKEVYFARGAVPPATPAAPLQGLKLPPLTHKYELLEQEPHKVFKGGREWRVDSSRFPISKTVTGVVLDLEPGALRELHWHPNADEWQYVIDGNISVTMFGSHGRYRTEQMEKGDVGYIPQGYGHSIENVGDRPCRVLIGFNTGNYQAIDLSQWIAGNPADVLATNFSKPTSLFEKFPKADVFIAPGK

SEQ ID NO: 679 - DNA, 1077 bp, synthetic construct
  misc_feature 1..1077: note = Variant of oxalate decarboxylase from Gemmata sp. SH-PL17
  source 1..1077: mol_type = other DNA
atgggtgaccctacctttatgaacaatgtaccagaccctgtgctgtcgggcaaagatttgccgacgttcaagtttgaactggaaaagagcaagggcaaagtcattgggaaaagttcgggaaaagaagcaaccgttgtccagttacctatctccaaaggcattgctggtgtgagcatgacccttgaaccgggtgcgatgcgcgaattgcactggcatgccacagcagcagagtgggggttcgtattaaccggccacgtccgtacgacggtgatcgatccacaaggtgcggccgaaaccaacgactttggaccgggcgacgtgtggtattttcctcgcggtcatgggcacatgctggaatgcctgggcgataaaccggcgcatttcattctgatcttcgataacggctacttctcagagtttggcaccttctctattactgactggatcggtcacacaccgaaagcgcttctcgccaagaactttggtctgcccgaatcggcttttgatgggtttcccaaaaaagaggtctattttgcacgtggcgcgaagccaccagccacccctgcagcgcctttacagggactgaagctgccaccactcacgcataaatacgaactcctcgaacaagaacctcacaaagtttttaaaggtggtcgtgaatggcgcgtggatagctcgcgttttcccatttccaagactgtaaccggcgttgttcttgatttggaacccggcgcgttacgcgagcttcactggcatcctaatgctgacgagtggcaatatgtgatcgatggcaacattagtgtgacgatgttcggttctcatggccgttaccgcaccgaacagatggagaagggtgatgtcgggtatattccacaggggtatggccacagcatcgaaaatgttggagatcgtccttgtcgcgtcttgattggctttaacacaggtaactaccaagcgatcgacttatcacagtggattgcaggtaatcccgcggatgttcttgccacgaacttctccaaacccaccagcctctttgaaaagttcccaaaacaggacgtgtttattgctcctggcaag

SEQ ID NO: 680 - protein, 359 aa, synthetic construct
  REGION 1..359: note = Variant of oxalate decarboxylase from Gemmata sp. SH-PL17
MGDPTFMNNVPDPVLSGKDLPTFKFELEKSKGKVIGKSSGKEATVVQLPISKGIAGVSMTLEPGAMRELHWHATAAEWGFVLTGHVRTTVIDPQGAAETNDFGPGDVWYFPRGHGHMLECLGDKPAHFILIFDNGYFSEFGTFSITDWIGHTPKALLAKNFGLPESAFDGFPKKEVYFARGAKPPATPAAPLQGLKLPPLTHKYELLEQEPHKVFKGGREWRVDSSRFPISKTVTGVVLDLEPGALRELHWHPNADEWQYVIDGNISVTMFGSHGRYRTEQMEKGDVGYIPQGYGHSIENVGDRPCRVLIGFNTGNYQAIDLSQWIAGNPADVLATNFSKPTSLFEKFPKQDVFIAPGK

SEQ ID NO: 681 - DNA, 1077 bp, synthetic construct
  misc_feature 1..1077: note = Variant of oxalate decarboxylase from Gemmata sp. SH-PL17
  source 1..1077: mol_type = other DNA
atgggtgaccctacctttatgaacaatgtaccagaccctgtgctgtcgggcaaatgtttgccgacgttcaagtttgaactggaaaagagcaagggcaaagtcattgggaaaagttcgggaaaagaagcaaccgttgtccagttacctatctcaaaaggcattgctggtgtgagcatgacccttgaaccgggtgcgatgcgcgaattgcactggcatgccacagcagcagagtgggggttcgtattaaccggccacgtccgtacgacggtgatcgatccacaaggtgcggccgaaaccaacgactttggaccgggcgacgtgtggtattttcctcgcggtcatgggcacatgctggaatgcctgggcgataaaccggcgcatttcattctgatcttcgataacggctacttctcagagtttggcaccttctctattactgactggatcggtcacacaccgaaagcgcttctcgccaagaactttggtctgcccgaatcggcttttgatgggtttcccaaaaaagaggtctattttgcacgtggcgcggttccaccagccacccctgcagcgcctttacagggactgaagctgccaccactcacgcataaatacgaactcctcgaacaagaacctcacaaagtttttaaaggtggtcgtgaatggcgcgtggatagctcgcgttttcccatttccaagactgtaaccggcgttgttcttgatttggaacccggcgcgttacgcgagcttcactggcatcctaatgctgacgagtggcaatatgtgatcgatggcaacattagtgtgacgatgttcggttctcatggccgttaccgcaccgaacagatggagaagggtgatgtcgggtatattccacaggggtatggccacagcatcgaaaatgttggagatcgtccttgtcgcgtcttgattggctttaacacaggtaactaccaagcgatcgacttatcacagtggattgcaggtaatcccgcggatgttcttgccacgaacttctccaaacccaccagcctctttgaaaagttcccaaaacaggacgtgtttattgctcctggcaag

SEQ ID NO: 682 - protein, 359 aa, synthetic construct
  REGION 1..359: note = Variant of oxalate decarboxylase from Gemmata sp. SH-PL17
MGDPTFMNNVPDPVLSGKCLPTFKFELEKSKGKVIGKSSGKEATVVQLPISKGIAGVSMTLEPGAMRELHWHATAAEWGFVLTGHVRTTVIDPQGAAETNDFGPGDVWYFPRGHGHMLECLGDKPAHFILIFDNGYFSEFGTFSITDWIGHTPKALLAKNFGLPESAFDGFPKKEVYFARGAVPPATPAAPLQGLKLPPLTHKYELLEQEPHKVFKGGREWRVDSSRFPISKTVTGVVLDLEPGALRELHWHPNADEWQYVIDGNISVTMFGSHGRYRTEQMEKGDVGYIPQGYGHSIENVGDRPCRVLIGFNTGNYQAIDLSQWIAGNPADVLATNFSKPTSLFEKFPKQDVFIAPGK

SEQ ID NO: 683 - DNA, 1077 bp, synthetic construct
  misc_feature 1..1077: note = Variant of oxalate decarboxylase from Gemmata sp. SH-PL17
  source 1..1077: mol_type = other DNA
atgggtgaccctacctttatgaacaatgtaccagaccctgtgctgtcgggcaaagatttgccgacgttcaagtttgaactggaaaagagcaagggcaaagtcattgggaaaagttcgggaaaagaagcaaccgttgtccagttacctatctccaaaggcattgctggtgtgagcatgacccttgaaccgggtgcgatgcgcgaattgcactggcatgccacagcagcagagtgggggttcgtattaaccggccacgtccgtacgacggtgatcgatccacaaggtgcggccgaaaccaacgactttggaccgggcgacgtgtggtattttcctcgcggtcatgggcacatgctggaatgcctgggcgataaaccggcgcatttcattctgatcttcgataacggctacttctcagagtttggcaccttctctattactgactggatcggtcacacaccgaaagcgcttctcgccaagaactttggtctgcccgaatcggcttttgatgggtttcccaaaaaagaggtctattttgcacgtggcgcggttccaccagccttgcctgcagcgcctttacagggactgaagctgccaccactcacgcataaatacgaactcctcgaacaagaacctcacaaagtttttaaaggtggtcgtgaatggcgcgtggatagctcgcgttttcccatttccaagactgtaaccggcgttgttcttgatttggaacccggcgcgttacgcgagcttcactggcatcctaatgctgacgagtggcaatatgtgatcgatggcaacattagtgtgacgatgttcggttctcatggccgttaccgcaccgaacagatggagaagggtgatgtcgggtatattccacaggggtatggccacagcatcgaaaatgttggagatcgtccttgtcgcgtcttgattggctttaacacaggtaactaccaagcgatcgacttatcacagtggattgcaggtaatcccgcggatgttcttgccacgaacttctccaaacccaccagcctctttgaaaagttcccaaaacaggacgtgtttattgctcctggcaag

SEQ ID NO: 684 - protein, 359 aa, synthetic construct
  REGION 1..359: note = Variant of oxalate decarboxylase from Gemmata sp. SH-PL17
MGDPTFMNNVPDPVLSGKDLPTFKFELEKSKGKVIGKSSGKEATVVQLPISKGIAGVSMTLEPGAMRELHWHATAAEWGFVLTGHVRTTVIDPQGAAETNDFGPGDVWYFPRGHGHMLECLGDKPAHFILIFDNGYFSEFGTFSITDWIGHTPKALLAKNFGLPESAFDGFPKKEVYFARGAVPPALPAAPLQGLKLPPLTHKYELLEQEPHKVFKGGREWRVDSSRFPISKTVTGVVLDLEPGALRELHWHPNADEWQYVIDGNISVTMFGSHGRYRTEQMEKGDVGYIPQGYGHSIENVGDRPCRVLIGFNTGNYQAIDLSQWIAGNPADVLATNFSKPTSLFEKFPKQDVFIAPGK

SEQ ID NO: 685 - DNA, 1077 bp, synthetic construct
  misc_feature 1..1077: note = Variant of oxalate decarboxylase from Gemmata sp. SH-PL17
  source 1..1077: mol_type = other DNA
atgggtgaccctacctttatgaacaatgtaccagaccctgtgctgtcgggcaaagatttgccgacgttcaagtttgaactggaaaagagcaagggcaaagtcattgggaaaagttcgggaaaagaagcaaccgttgtccagttacctatctccaaaggcattgctggtgtgagcatgacccttgaaccgggtgcgatgcgcgaattgcactggcatgccacagcagcagagtgggggttcgtattaaccggccacgtccgtacgacggtgatcgatccacaaggtgcggccgaaaccaacgactttggaccgggcgacgtgtggtattttcctcgcggtcatgggcacatgctggaatgcctgggcagtaaaccggcgcatttcattctgatcttcgataacggctacttctcagagtttggcaccttctctattactgactggatcggtcacacaccgaaagcgcttctcgccaagaactttggtctgcccgaatcggcttttgatgggtttcccaaaaaagaggtctattttgcacgtggcgcggttccaccagccacccctgcagcgcctttacagggactgaagctgccaccactcacgcataaatacgaactcctcgaacaagaacctcacaaagtttttaaaggtggtcgtgaatggcgcgtggatagctcgcgttttcccatttccaagactgtaaccggcgttgttcttgatttggaacccggcgcgttacgcgagcttcactggcatcctaatgctgacgagtggcaatatgtgatcgatggcaacattagtgtgacgatgttcggttctcatggccgttaccgcaccgaacagatggagaagggtgatgtcgggtatattccacaggggtatggccacagcatcgaaaatgttggagatcgtccttgtcgcgtcttgattggctttaacacaggtaactaccaagcgatcgacttatcacagtggattgcaggtaatcccgcggatgttcttgccacgaacttctccaaacccaccagcctctttgaaaagttcccaaaacaggacgtgtttattgctcctggcaag

SEQ ID NO: 686 - protein, 359 aa, synthetic construct
  REGION 1..359: note = Variant of oxalate decarboxylase from Gemmata sp. SH-PL17
MGDPTFMNNVPDPVLSGKDLPTFKFELEKSKGKVIGKSSGKEATVVQLPISKGIAGVSMTLEPGAMRELHWHATAAEWGFVLTGHVRTTVIDPQGAAETNDFGPGDVWYFPRGHGHMLECLGSKPAHFILIFDNGYFSEFGTFSITDWIGHTPKALLAKNFGLPESAFDGFPKKEVYFARGAVPPATPAAPLQGLKLPPLTHKYELLEQEPHKVFKGGREWRVDSSRFPISKTVTGVVLDLEPGALRELHWHPNADEWQYVIDGNISVTMFGSHGRYRTEQMEKGDVGYIPQGYGHSIENVGDRPCRVLIGFNTGNYQAIDLSQWIAGNPADVLATNFSKPTSLFEKFPKQDVFIAPGK

SEQ ID NO: 687 - DNA, 1077 bp, synthetic construct
  misc_feature 1..1077: note = Variant of oxalate decarboxylase from Gemmata sp. SH-PL17
  source 1..1077: mol_type = other DNA
atgggtgaccctacctttatgaacaatgtaccagaccctgtgctgtcgggcaaagatttgccgacgttcaagtttgaactggaaaagagcaagggcaaagtcattgggaaaagttcgggaaaagaagcaaccgttgtccagttacctatctccaaaggcattgctggtgtgagcatgacccttgaaccgggtgcgatgcgcgaattgcactggcatgccacagcagcagagtgggggttcgtattaaccggcggggtccgtacgacggtgatcgatccacaaggtgcggccgaaaccaacgactttggaccgggcgacgtgtggtattttcctcgcggtcatgggcacatgctggaatgcctgggcgataaaccggcgcatttcattctgatcttcgataacggctacttctcagagtttggcaccttctctattactgactggatcggtcacacaccgaaagcgcttctcgccaagaactttggtctgcccgaatcggcttttgatgggtttcccaaaaaagaggtctattttgcacgtggcgcggttccaccagccacccctgcagcgcctttacagggactgaagctgccaccactcacgcataaatacgaactcctcgaacaagaacctcacaaagtttttaaaggtggtcgtgaatggcgcgtggatagctcgcgttttcccatttccaagactgtaaccggcgttgttcttgatttggaacccggcgcgttacgcgagcttcactggcatcctaatgctgacgagtggcaatatgtgatcgatggcaacattagtgtgacgatgttcggttctcatggccgttaccgcaccgaacagatggagaagggtgatgtcgggtatattccacaggggtatggccacagcatcgaaaatgttggagatcgtccttgtcgcgtcttgattggctttaacacaggtaactaccaagcgatcgacttatcacagtggattgcaggtaatcccgcggatgttcttgccacgaacttctccaaacccaccagcctctttgaaaagttcccaaaacaggacgtgtttattgctcctggcaag

SEQ ID NO: 688 - protein, 359 aa, synthetic construct
  REGION 1..359: note = Variant of oxalate decarboxylase from Gemmata sp. SH-PL17
MGDPTFMNNVPDPVLSGKDLPTFKFELEKSKGKVIGKSSGKEATVVQLPISKGIAGVSMTLEPGAMRELHWHATAAEWGFVLTGGVRTTVIDPQGAAETNDFGPGDVWYFPRGHGHMLECLGDKPAHFILIFDNGYFSEFGTFSITDWIGHTPKALLAKNFGLPESAFDGFPKKEVYFARGAVPPATPAAPLQGLKLPPLTHKYELLEQEPHKVFKGGREWRVDSSRFPISKTVTGVVLDLEPGALRELHWHPNADEWQYVIDGNISVTMFGSHGRYRTEQMEKGDVGYIPQGYGHSIENVGDRPCRVLIGFNTGNYQAIDLSQWIAGNPADVLATNFSKPTSLFEKFPKQDVFIAPGK

SEQ ID NO: 689 - DNA, 1077 bp, synthetic construct
  misc_feature 1..1077: note = Variant of oxalate decarboxylase from Gemmata sp. SH-PL17
  source 1..1077: mol_type = other DNA
atgggtgaccctacctttatgaacaatgtaccagaccctgtgctgtcgggcaaagatttgccgacgttcaagtttgaactggaaaagagcaagggcaaagtcattgggaaaagttcgggaaaagaagcaaccgttgtccagttacctatctccaaaggcattgctggtgtgagcatgacccttgaaccgggtgcgatgcgcgaattgcactggcatgccacagcagcagagtgggggttcgtattaaccggccacgtccgtacgacggtgatcgatccacaaggtgcggccgaaaccaacgactttggaccgggcgacgtgtggtattttcctcgcggtcatgggcacatgctggaatgcctgggcgataaaccggcgcatttcattctgatcttcgataacggctacttctcagagtttggcaccttctctattactgactggatcggtcacacaccgaaagcgcttctcgccaagaactttggtctgcccgaatcggcttttgatgggtttcccaaaaaagaggtctattttgcacgtggcgcggttccaccagcctctcctgcagcgcctttacagggactgaagctgccaccactcacgcataaatacgaactcctcgaacaagaacctcacaaagtttttaaaggtggtcgtgaatggcgcgtggatagctcgcgttttcccatttccaagactgtaaccggcgttgttcttgatttggaacccggcgcgttacgcgagcttcactggcatcctaatgctgacgagtggcaatatgtgatcgatggcaacattagtgtgacgatgttcggttctcatggccgttaccgcaccgaacagatggagaagggtgatgtcgggtatattccacaggggtatggccacagcatcgaaaatgttggagatcgtccttgtcgcgtcttgattggctttaacacaggtaactaccaagcgatcgacttatcacagtggattgcaggtaatcccgcggatgttcttgccacgaacttctccaaacccaccagcctctttgaaaagttcccaaaacaggacgtgtttattgctcctggcaag

SEQ ID NO: 690 - protein, 359 aa, synthetic construct
  REGION 1..359: note = Variant of oxalate decarboxylase from Gemmata sp. SH-PL17
MGDPTFMNNVPDPVLSGKDLPTFKFELEKSKGKVIGKSSGKEATVVQLPISKGIAGVSMTLEPGAMRELHWHATAAEWGFVLTGHVRTTVIDPQGAAETNDFGPGDVWYFPRGHGHMLECLGDKPAHFILIFDNGYFSEFGTFSITDWIGHTPKALLAKNFGLPESAFDGFPKKEVYFARGAVPPASPAAPLQGLKLPPLTHKYELLEQEPHKVFKGGREWRVDSSRFPISKTVTGVVLDLEPGALRELHWHPNADEWQYVIDGNISVTMFGSHGRYRTEQMEKGDVGYIPQGYGHSIENVGDRPCRVLIGFNTGNYQAIDLSQWIAGNPADVLATNFSKPTSLFEKFPKQDVFIAPGK

SEQ ID NO: 691 - DNA, 1077 bp, synthetic construct
  misc_feature 1..1077: note = Variant of oxalate decarboxylase from Gemmata sp. SH-PL17
  source 1..1077: mol_type = other DNA
atgggtgaccctacctttatgaacaatgtaccagaccctgtgctgtcgggcaaagatttgccgacgttcaagtttgaactggaaaagagcaagggcaaagtcattgggaaaagttcgggaaaagaagcaaccgttgtccagttacctatctccaaaggcattgctggtgtgagcatgacccttgaaccgggtgcgatgcgcgaattgcactggcatgccacagcagcagagtgggggttcgtattaaccggccacgtccgtacgacggtgatcgatccacaaggtgcggccgaaaccaacgactttggaccgggcgacgtgtggtattttcctcgcggtcatgggcacatgctggaatgcctgggcgataaaccggcgcatttcattctgatcttcgataacggctacttctcagagtttggcaccttctctattactgactggatcggtcacacaccgaaagcgcttctcgccaagaactttggtctgcccgaatcggcttttgatgggtttcccaaaaaagaggtctattttgcacgtggcgcgtgtccaccagccacccctgcagcgcctttacagggactgaagctgccaccactcacgcataaatacgaactcctcgaacaagaacctcacaaagtttttaaaggtggtcgtgaatggcgcgtggatagctcgcgttttcccatttccaagactgtaaccggcgttgttcttgatttggaacccggcgcgttacgcgagcttcactggcatcctaatgctgacgagtggcaatatgtgatcgatggcaacattagtgtgacgatgttcggttctcatggccgttaccgcaccgaacagatggagaagggtgatgtcgggtatattccacaggggtatggccacagcatcgaaaatgttggagatcgtccttgtcgcgtcttgattggctttaacacaggtaactaccaagcgatcgacttatcacagtggattgcaggtaatcccgcggatgttcttgccacgaacttctccaaacccaccagcctctttgaaaagttcccaaaacaggacgtgtttattgctcctggcaag

SEQ ID NO: 692 - protein, 359 aa, synthetic construct
  REGION 1..359: note = Variant of oxalate decarboxylase from Gemmata sp. SH-PL17
MGDPTFMNNVPDPVLSGKDLPTFKFELEKSKGKVIGKSSGKEATVVQLPISKGIAGVSMTLEPGAMRELHWHATAAEWGFVLTGHVRTTVIDPQGAAETNDFGPGDVWYFPRGHGHMLECLGDKPAHFILIFDNGYFSEFGTFSITDWIGHTPKALLAKNFGLPESAFDGFPKKEVYFARGACPPATPAAPLQGLKLPPLTHKYELLEQEPHKVFKGGREWRVDSSRFPISKTVTGVVLDLEPGALRELHWHPNADEWQYVIDGNISVTMFGSHGRYRTEQMEKGDVGYIPQGYGHSIENVGDRPCRVLIGFNTGNYQAIDLSQWIAGNPADVLATNFSKPTSLFEKFPKQDVFIAPGK

SEQ ID NO: 693 - DNA, 1077 bp, synthetic construct
  misc_feature 1..1077: note = Variant of oxalate decarboxylase from Gemmata sp. SH-PL17
  source 1..1077: mol_type = other DNA
atgggtgaccctacctttatgaacaatgtaccagaccctgtgctgtcgggcaaagatttgccgacgttcaagtttgaactggaaaagagcaagggcaaagtcattgggaaaagttcgggaaaagaagcaaccgttgtccagttacctatctccaaaggcattgctggtgtgagcatgacccttgaaccgggtgcgatgcgcgaattgcactggcatgccacagcagcagagtgggggttcgtattaaccggccacgtccgtacgacggtgatcgatccacaaggtgcggccgaaaccaacgactttggaccgggcgacgtgtggtattttcctcgcggtcatgggcacatgctggaatgcctgggcgggaaaccggcgcatttcattctgatcttcgataacggctacttctcagagtttggcaccttctctattactgactggatcggtcacacaccgaaagcgcttctcgccaagaactttggtctgcccgaatcggcttttgatgggtttcccaaaaaagaggtctattttgcacgtggcgcggttccaccagccacccctgcagcgcctttacagggactgaagctgccaccactcacgcataaatacgaactcctcgaacaagaacctcacaaagtttttaaaggtggtcgtgaatggcgcgtggatagctcgcgttttcccatttccaagactgtaaccggcgttgttcttgatttggaacccggcgcgttacgcgagcttcactggcatcctaatgctgacgagtggcaatatgtgatcgatggcaacattagtgtgacgatgttcggttctcatggccgttaccgcaccgaacagatggagaagggtgatgtcgggtatattccacaggggtatggccacagcatcgaaaatgttggagatcgtccttgtcgcgtcttgattggctttaacacaggtaactaccaagcgatcgacttatcacagtggattgcaggtaatcccgcggatgttcttgccacgaacttctccaaacccaccagcctctttgaaaagttcccaaaacaggacgtgtttattgctcctggcaag

SEQ ID NO: 694 - protein, 359 aa, synthetic construct
  REGION 1..359: note = Variant of oxalate decarboxylase from Gemmata sp. SH-PL17
MGDPTFMNNVPDPVLSGKDLPTFKFELEKSKGKVIGKSSGKEATVVQLPISKGIAGVSMTLEPGAMRELHWHATAAEWGFVLTGHVRTTVIDPQGAAETNDFGPGDVWYFPRGHGHMLECLGGKPAHFILIFDNGYFSEFGTFSITDWIGHTPKALLAKNFGLPESAFDGFPKKEVYFARGAVPPATPAAPLQGLKLPPLTHKYELLEQEPHKVFKGGREWRVDSSRFPISKTVTGVVLDLEPGALRELHWHPNADEWQYVIDGNISVTMFGSHGRYRTEQMEKGDVGYIPQGYGHSIENVGDRPCRVLIGFNTGNYQAIDLSQWIAGNPADVLATNFSKPTSLFEKFPKQDVFIAPGK

SEQ ID NO: 695 - DNA, 1077 bp, synthetic construct
  misc_feature 1..1077: note = Variant of oxalate decarboxylase from Gemmata sp. SH-PL17
  source 1..1077: mol_type = other DNA
atgggtgaccctacctttatgaacaatgtaccagaccctgtgctgtcgggcaaagatttgccgacgttcaagtttgaactggaaaagagcaagggcaaagtcattgggaaaagttcgggaaaagaagcaaccgttgtccagttacctatctccaaaggcattgctggtgtgagcatgacccttgaaccgggtgcgatgcgcgaattgcactggcatgccacagcagcagagtgggggttcgtattaaccggccacgtccgtacgacggtgatcgatccacaaggtgcggccgaaaccaacgactttggaccgggcgacgtgtggtattttcctcgcggtcatgggcacatgctggaatgcctgggcgataaaccggcgcatttcattctgatcttcgataacggctacttctcagagtttggcaccttctctattactgactggatcggtcacacaccgaaagcgcttctcgccaagaactttggtctgcccgaatcggcttttgatgggtttcccaaaaaagaggtctattttgcacgtggcgcggttccaccagccacccctgcagcgcctttacagggactgaagctgccaccactcacgcataaatacgaactcctcgaacaagaacctcacaaagtttttaaaggtggtcgtgaatggcgcgtggatagctcgcgttttcccatttccaagactgtaaccggcgttgttcttgatttggaacccggcgcgttacgcgagcttcactggcatcctaatgctgacgagtggcaatatgtgatcgatggcaacattagtgtgacgatgttcggttctcatggccgttaccgcaccgaacagatggagaagggtgatgtcgggtatattccacaggggtatggccacagcatcgaaaatgttggagatcgtccttgtcgcgtcttgattggctttaacacaggtaactaccaagcgatcgacttatcacagtggattgcaggtaatcccgcggatgttcttgccacgaacttctccaaacccaccagcctctttgaaaagttcccacgtcaggacgtgtttattgctcctggcaag

SEQ ID NO: 696 - protein, 359 aa, synthetic construct
  REGION 1..359: note = Variant of oxalate decarboxylase from Gemmata sp. SH-PL17
MGDPTFMNNVPDPVLSGKDLPTFKFELEKSKGKVIGKSSGKEATVVQLPISKGIAGVSMTLEPGAMRELHWHATAAEWGFVLTGHVRTTVIDPQGAAETNDFGPGDVWYFPRGHGHMLECLGDKPAHFILIFDNGYFSEFGTFSITDWIGHTPKALLAKNFGLPESAFDGFPKKEVYFARGAVPPATPAAPLQGLKLPPLTHKYELLEQEPHKVFKGGREWRVDSSRFPISKTVTGVVLDLEPGALRELHWHPNADEWQYVIDGNISVTMFGSHGRYRTEQMEKGDVGYIPQGYGHSIENVGDRPCRVLIGFNTGNYQAIDLSQWIAGNPADVLATNFSKPTSLFEKFPRQDVFIAPGK

SEQ ID NO: 697 - DNA, 1077 bp, synthetic construct
  misc_feature 1..1077: note = Variant of oxalate decarboxylase from Gemmata sp. SH-PL17
  source 1..1077: mol_type = other DNA
atgggtgaccctacctttatgaacaatgtaccagaccctgtgctgtcgggcaaagatttgccgacgttcaagtttgaactggaaaagagcaagggcaaagtcattgggaaaagttcgggaaaagaagcaaccgttgtccagttacctatctccaaaggcattgctggtgtgagcatgacccttgaaccgggtgcgatgcgcgaattgcactggcatgccacagcagcagagtgggggttcgtattaaccggcgaggtccgtacgacggtgatcgatccacaaggtgcggccgaaaccaacgactttggaccgggcgacgtgtggtattttcctcgcggtcatgggcacatgctggaatgcctgggcgataaaccggcgcatttcattctgatcttcgataacggctacttctcagagtttggcaccttctctattactgactggatcggtcacacaccgaaagcgcttctcgccaagaactttggtctgcccgaatcggcttttgatgggtttcccaaaaaagaggtctattttgcacgtggcgcggttccaccagccacccctgcagcgcctttacagggactgaagctgccaccactcacgcataaatacgaactcctcgaacaagaacctcacaaagtttttaaaggtggtcgtgaatggcgcgtggatagctcgcgttttcccatttccaagactgtaaccggcgttgttcttgatttggaacccggcgcgttacgcgagcttcactggcatcctaatgctgacgagtggcaatatgtgatcgatggcaacattagtgtgacgatgttcggttctcatggccgttaccgcaccgaacagatggagaagggtgatgtcgggtatattccacaggggtatggccacagcatcgaaaatgttggagatcgtccttgtcgcgtcttgattggctttaacacaggtaactaccaagcgatcgacttatcacagtggattgcaggtaatcccgcggatgttcttgccacgaacttctccaaacccaccagcctctttgaaaagttcccaaaacaggacgtgtttattgctcctggcaag

SEQ ID NO: 698 - protein, 359 aa, synthetic construct
  REGION 1..359: note = Variant of oxalate decarboxylase from Gemmata sp. SH-PL17
MGDPTFMNNVPDPVLSGKDLPTFKFELEKSKGKVIGKSSGKEATVVQLPISKGIAGVSMTLEPGAMRELHWHATAAEWGFVLTGEVRTTVIDPQGAAETNDFGPGDVWYFPRGHGHMLECLGDKPAHFILIFDNGYFSEFGTFSITDWIGHTPKALLAKNFGLPESAFDGFPKKEVYFARGAVPPATPAAPLQGLKLPPLTHKYELLEQEPHKVFKGGREWRVDSSRFPISKTVTGVVLDLEPGALRELHWHPNADEWQYVIDGNISVTMFGSHGRYRTEQMEKGDVGYIPQGYGHSIENVGDRPCRVLIGFNTGNYQAIDLSQWIAGNPADVLATNFSKPTSLFEKFPKQDVFIAPGK

SEQ ID NO: 699 - DNA, 1077 bp, synthetic construct
  misc_feature 1..1077: note = Variant of oxalate decarboxylase from Gemmata sp. SH-PL17
  source 1..1077: mol_type = other DNA
atgggtgaccctacctttatgaacaatgtaccagaccctgtgctgtcgggcaaagatttgccgacgttcaagtttgaactggaaaagagcaagggcaaagtcattgggaaaagttcgggaaaagaagcaaccgttgtccagttacctatctccaaaggcattgctggtgtgagcatgacccttgaaccgggtgcgatgcgcgaattgcactggcatgccacagcagcagagtgggggttcgtattaaccggccacgtccgtacgacggtgatcgatccacaaggtgcggccgaaaccaacgactttggaccgggcgacgtgtggtattttcctcgcggtcatgggcacatgctggaatgcctgggcgataaaccggcgcatttcattctgatcttcgataacggctacttctcagagtttggcaccttctctattactgactggatcggtcacacaccgaaagcgcttctcgccaagaactttggtctgcccgaatcggcttttgatgggtttcccaaaaaagaggtctattttgcacgtggcgcggttccaccagccacccctgcagcgcctttacagggactgaagctgccaccactcacgcataaatacgcgctcctcgaacaagaacctcacaaagtttttaaaggtggtcgtgaatggcgcgtggatagctcgcgttttcccatttccaagactgtaaccggcgttgttcttgatttggaacccggcgcgttacgcgagcttcactggcatcctaatgctgacgagtggcaatatgtgatcgatggcaacattagtgtgacgatgttcggttctcatggccgttaccgcaccgaacagatggagaagggtgatgtcgggtatattccacaggggtatggccacagcatcgaaaatgttggagatcgtccttgtcgcgtcttgattggctttaacacaggtaactaccaagcgatcgacttatcacagtggattgcaggtaatcccgcggatgttcttgccacgaacttctccaaacccaccagcctctttgaaaagttcccaaaacaggacgtgtttattgctcctggcaag

SEQ ID NO: 700 - protein, 359 aa, synthetic construct
  REGION 1..359: note = Variant of oxalate decarboxylase from Gemmata sp. SH-PL17
MGDPTFMNNVPDPVLSGKDLPTFKFELEKSKGKVIGKSSGKEATVVQLPISKGIAGVSMTLEPGAMRELHWHATAAEWGFVLTGHVRTTVIDPQGAAETNDFGPGDVWYFPRGHGHMLECLGDKPAHFILIFDNGYFSEFGTFSITDWIGHTPKALLAKNFGLPESAFDGFPKKEVYFARGAVPPATPAAPLQGLKLPPLTHKYALLEQEPHKVFKGGREWRVDSSRFPISKTVTGVVLDLEPGALRELHWHPNADEWQYVIDGNISVTMFGSHGRYRTEQMEKGDVGYIPQGYGHSIENVGDRPCRVLIGFNTGNYQAIDLSQWIAGNPADVLATNFSKPTSLFEKFPKQDVFIAPGK

SEQ ID NO: 701 - DNA, 1077 bp, synthetic construct
  misc_feature 1..1077: note = Variant of oxalate decarboxylase from Gemmata sp. SH-PL17
  source 1..1077: mol_type = other DNA
atgggtgaccctacctttatgaacaatgtaccagaccctgtgctgtcgggcaaagatttgccgacgttcaagtttgaactggaaaagagcaagggcaaagtcattgggaaaagttcgggaaaagaagcaaccgttgtccagttacctatctccaaaggcattgctggtgtgagcatgacccttgaaccgggtgcgatgcgcgaattgcactggcatgccacagcagcagagtgggggttcgtattaaccggccacgtccgtacgacggtgatcgatccacaaggtgcggccgaaaccaacgactttggaccgggcgacgtgtggtattttcctcgcggtcatgggcacatgctggaatgcctgggcgataaaccggcgcatttcattctgatcttcgataacggctacttctcagagtttggcaccttctctattactgactggatcggtcacacaccgaaagcgcttctcgccaagaactttggtctgcccgaatcggcttttgatgggtttcccaaaaaagaggtctattttgcacgtggcgcggttccaccagccacccctgcagcgcctttacagggactgaagctgccaccactcacgcataaatacgaactcctcgaacaagaacctcacaaagtttttaaaggtggtcgtgaatggcgcgtggatagctcgcgttttcccatttccaagactgtaaccggcgttgttcttgatttggaacccggcgcgttacgcgagcttcactggcatcctaatgctgacgagtggcaatatgtgatcgatggcaacattagtgtgacgatgttcggttctcatggccgttaccgcaccgaacagatggagcggggtgatgtcgggtatattccacaggggtatggccacagcatcgaaaatgttggagatcgtccttgtcgcgtcttgattggctttaacacaggtaactaccaagcgatcgacttatcacagtggattgcaggtaatcccgcggatgttcttgccacgaacttctccaaacccaccagcctctttgaaaagttcccaaaacaggacgtgtttattgctcctggcaag

SEQ ID NO: 702 - protein, 359 aa, synthetic construct
  REGION 1..359: note = Variant of oxalate decarboxylase from Gemmata sp. SH-PL17
MGDPTFMNNVPDPVLSGKDLPTFKFELEKSKGKVIGKSSGKEATVVQLPISKGIAGVSMTLEPGAMRELHWHATAAEWGFVLTGHVRTTVIDPQGAAETNDFGPGDVWYFPRGHGHMLECLGDKPAHFILIFDNGYFSEFGTFSITDWIGHTPKALLAKNFGLPESAFDGFPKKEVYFARGAVPPATPAAPLQGLKLPPLTHKYELLEQEPHKVFKGGREWRVDSSRFPISKTVTGVVLDLEPGALRELHWHPNADEWQYVIDGNISVTMFGSHGRYRTEQMERGDVGYIPQGYGHSIENVGDRPCRVLIGFNTGNYQAIDLSQWIAGNPADVLATNFSKPTSLFEKFPKQDVFIAPGK

SEQ ID NO: 703 - DNA, 1077 bp, synthetic construct
  misc_feature 1..1077: note = Variant of oxalate decarboxylase from Gemmata sp. SH-PL17
  source 1..1077: mol_type = other DNA
atgggtgaccctacctttatgaacaatgtaccagaccctgtgctgtcgggcaaagatttgccgacgttcaagtttgaactggaaaagagcaagggcaaagtcattgggaaaagttcgggaaaagaagcaaccgttgtccagttacctatctccaaaggcattgctggtgtgagcatgacccttgaaccgggtgcgatgcgcgaattgcactggcatgccacagcagcagagtgggggttcgtattaaccggccacgtccgtacgacggtgatcgatccacaaggtgcggccgaaaccaacgactttggaccgggcgacgtgtggtattttcctcgcggtcatgggcacatgctggaatgcctgggcgataaaccggcgcatttcattctgatcttcgataacggctacttctcagagtttggcaccttctctattactgactggatcggtcacacaccgaaagcgcttctcgccaagaactttggtctgcccgaatcggcttttgatgggtttcccaaaaaagaggtctattttgcacgtggcgcggttccaccagccacccctgcagcgcctttacagggactgaagctgccagtgctcacgcataaatacgaactcctcgaacaagaacctcacaaagtttttaaaggtggtcgtgaatggcgcgtggatagctcgcgttttcccatttccaagactgtaaccggcgttgttcttgatttggaacccggcgcgttacgcgagcttcactggcatcctaatgctgacgagtggcaatatgtgatcgatggcaacattagtgtgacgatgttcggttctcatggccgttaccgcaccgaacagatggagaagggtgatgtcgggtatattccacaggggtatggccacagcatcgaaaatgttggagatcgtccttgtcgcgtcttgattggctttaacacaggtaactaccaagcgatcgacttatcacagtggattgcaggtaatcccgcggatgttcttgccacgaacttctccaaacccaccagcctctttgaaaagttcccaaaacaggacgtgtttattgctcctggcaag

SEQ ID NO: 704 - protein, 359 aa, synthetic construct
  REGION 1..359: note = Variant of oxalate decarboxylase from Gemmata sp. SH-PL17
MGDPTFMNNVPDPVLSGKDLPTFKFELEKSKGKVIGKSSGKEATVVQLPISKGIAGVSMTLEPGAMRELHWHATAAEWGFVLTGHVRTTVIDPQGAAETNDFGPGDVWYFPRGHGHMLECLGDKPAHFILIFDNGYFSEFGTFSITDWIGHTPKALLAKNFGLPESAFDGFPKKEVYFARGAVPPATPAAPLQGLKLPVLTHKYELLEQEPHKVFKGGREWRVDSSRFPISKTVTGVVLDLEPGALRELHWHPNADEWQYVIDGNISVTMFGSHGRYRTEQMEKGDVGYIPQGYGHSIENVGDRPCRVLIGFNTGNYQAIDLSQWIAGNPADVLATNFSKPTSLFEKFPKQDVFIAPGK

SEQ ID NO: 705 - DNA, 1077 bp, synthetic construct
  misc_feature 1..1077: note = Variant of oxalate decarboxylase from Gemmata sp. SH-PL17
  source 1..1077: mol_type = other DNA
atgggtgaccctacctttatgaacaatgtaccagaccctgtgctgtcgggcaaagatttgccgacgttcaagtttgaactggaaaagagcaagggcaaagtcattgggaaaagttcgggaaaagaagcaaccgttgtccagttacctatctccaaaggcattgctggtgtgagcatgacccttgaaccgggtgcgatgcgcgaattgcactggcatgccacagcagcagagtgggggttcgtattaaccggccacgtccgtacgacggtgatcgatccacaaggtgcggccgaaaccaacgactttggaccgggcgacgtgtggtattttcctcgcggtcatgggcacatgctggaatgcctgggcgataaaccggcgcatttcattctgatcttcgataacggctacttctcagagtttggcaccttctctattactgactggatcggtcacacaccgaaagcgcttctcgccaagaactttggtctgcccgaatcggcttttgatgggtttcccaaaaaagaggtctattttgcacgtggcgcggttccaccagccacccctgcagcgcctttacagggactgaagctgccaccactcacgcataaatacgaactcctcgaacaagaacctcacaaagtttttaaaggtggtcgtgaatggcgcgtggatagctcgcgttttcccatttccaagactgtaaccggcgttgttcttgatttggaacccggcgcgttacgcgagcttcactggcatcctaatgctgacgagtggcaatatgtgatcgatggcaacattagtgtgacgatgttcggttctcatggccgttaccgcaccgaacagatggagaagggtgatgtcgggtatattccacaggggtatggccacagcatcgaaaatgttggagatcgtccttgtcgcgtcttgattggctttaacacaggtaactaccaagcgatcgacttatcacagtggattgcaggtaatcccgcggatgttcttgccacgaacttctccaaacccaccagcctcttttggaagttcccaaaacaggacgtgtttattgctcctggcaag

SEQ ID NO: 706 - protein, 359 aa, synthetic construct
  REGION 1..359: note = Variant of oxalate decarboxylase from Gemmata sp. SH-PL17
MGDPTFMNNVPDPVLSGKDLPTFKFELEKSKGKVIGKSSGKEATVVQLPISKGIAGVSMTLEPGAMRELHWHATAAEWGFVLTGHVRTTVIDPQGAAETNDFGPGDVWYFPRGHGHMLECLGDKPAHFILIFDNGYFSEFGTFSITDWIGHTPKALLAKNFGLPESAFDGFPKKEVYFARGAVPPATPAAPLQGLKLPPLTHKYELLEQEPHKVFKGGREWRVDSSRFPISKTVTGVVLDLEPGALRELHWHPNADEWQYVIDGNISVTMFGSHGRYRTEQMEKGDVGYIPQGYGHSIENVGDRPCRVLIGFNTGNYQAIDLSQWIAGNPADVLATNFSKPTSLFWKFPKQDVFIAPGK

SEQ ID NO: 707 - DNA, 1077 bp, synthetic construct
  misc_feature 1..1077: note = Variant of oxalate decarboxylase from Gemmata sp. SH-PL17
  source 1..1077: mol_type = other DNA
atgggtgaccctacctttatgaacaatgtaccagaccctgtgctgtcgggcaaagatttgccgacgttcaagtttgaactggaaaagagcaagggcaaagtcattgggaaaagttcgggaaaagaagcaaccgttgtccagttacctatctccaaaggcattgctggtgtgagcatgacccttgaaccgggtgcgatgcgcgaattgcactggcatgccacagcagcagagtgggggttcgtattaaccggccacgtccgtacgacggtgatcgatccacaaggtgcggccgaaaccaacgactttggaccgggcgacgtgtggtattttcctcgcggtcatgggcacatgctggaatgcctgggcgataaaccggcgcatttcattctgatcttcgataacggctacttctcagagtttggcaccttctctattactgactggatcggtcacacaccgaaagcgcttctcgccaagaactttggtctgcccgaatcggcttttgatgggtttcccaaaaaagaggtctattttgcacgtggcgcggttccaccagccacccctgcagcgcctttacagggactgaagctgccaccactcacgcataaatacgaactcctcgaacaagaacctcacaaagtttttaaaggtggtcgtgaatggcgcgtggatagctcgcgttttcccatttccaagactgtaaccggcgttgttcttgatttggaacccggcgcgttacgcgagcttcactggcatcctaatgctgacgagtggcaatatgtgatcgatggcaacattagtgtgacgatgttcggttctcatggccgttaccgcaccgaacagatggagaagggtgatgtcgggtatattccacaggggtatggccacagcatcgaaaatgttggagatcgtccttgtcgcgtcttgattggctttaacacaggtaactaccaagcgatcgacttatcacagtggattgcaggtaatcccgcggatgttcttgccacgaacttctccaaacccacctggctctttgaaaagttcccaaaacaggacgtgtttattgctcctggcaag

SEQ ID NO: 708 - protein, 359 aa, synthetic construct
  REGION 1..359: note = Variant of oxalate decarboxylase from Gemmata sp. SH-PL17
MGDPTFMNNVPDPVLSGKDLPTFKFELEKSKGKVIGKSSGKEATVVQLPISKGIAGVSMTLEPGAMRELHWHATAAEWGFVLTGHVRTTVIDPQGAAETNDFGPGDVWYFPRGHGHMLECLGDKPAHFILIFDNGYFSEFGTFSITDWIGHTPKALLAKNFGLPESAFDGFPKKEVYFARGAVPPATPAAPLQGLKLPPLTHKYELLEQEPHKVFKGGREWRVDSSRFPISKTVTGVVLDLEPGALRELHWHPNADEWQYVIDGNISVTMFGSHGRYRTEQMEKGDVGYIPQGYGHSIENVGDRPCRVLIGFNTGNYQAIDLSQWIAGNPADVLATNFSKPTWLFEKFPKQDVFIAPGK

SEQ ID NO: 709 - DNA, 1077 bp, synthetic construct
  misc_feature 1..1077: note = Variant of oxalate decarboxylase from Gemmata sp. SH-PL17
  source 1..1077: mol_type = other DNA
atgggtgaccctacctttatgaacaatgtaccagaccctgtgctgtcgggcaaagatttgccgacgttcaagtttgaactggaaaagagcaagggcaaagtcattgggaaaagttcgggaaaagaagcaaccgttgtccagttacctatctccaaaggcattgctggtgtgagcatgacccttgaaccgggtgcgatgcgcgaattgcactggcatgccacagcagcagagtgggggttcgtattaaccggccacgtccgtacgacggtgatcgatccacaaggtgcggccgaaaccaacgactttggaccgggcgacgtgtggtattttcctcgcggtcatgggcacatgctggaatgcctgggcgataaaccggcgcatttcattctgatcttcgataacggctacttctcagagtttggcaccttctctattactgactggatcggtcacacaccgaaagcgcttctcgccaagaactttggtctggttgaatcggcttttgatgggtttcccaaaaaagaggtctattttgcacgtggcgcggttccaccagccacccctgcagcgcctttacagggactgaagctgccaccactcacgcataaatacgaactcctcgaacaagaacctcacaaagtttttaaaggtggtcgtgaatggcgcgtggatagctcgcgttttcccatttccaagactgtaaccggcgttgttcttgatttggaacccggcgcgttacgcgagcttcactggcatcctaatgctgacgagtggcaatatgtgatcgatggcaacattagtgtgacgatgttcggttctcatggccgttaccgcaccgaacagatggagaagggtgatgtcgggtatattccacaggggtatggccacagcatcgaaaatgttggagatcgtccttgtcgcgtcttgattggctttaacacaggtaactaccaagcgatcgacttatcacagtggattgcaggtaatcccgcggatgttcttgccacgaacttctccaaacccaccagcctctttgaaaagttcccaaaacaggacgtgtttattgctcctggcaag

SEQ ID NO: 710 - protein, 359 aa, synthetic construct
  REGION 1..359: note = Variant of oxalate decarboxylase from Gemmata sp. SH-PL17
MGDPTFMNNVPDPVLSGKDLPTFKFELEKSKGKVIGKSSGKEATVVQLPISKGIAGVSMTLEPGAMRELHWHATAAEWGFVLTGHVRTTVIDPQGAAETNDFGPGDVWYFPRGHGHMLECLGDKPAHFILIFDNGYFSEFGTFSITDWIGHTPKALLAKNFGLVESAFDGFPKKEVYFARGAVPPATPAAPLQGLKLPPLTHKYELLEQEPHKVFKGGREWRVDSSRFPISKTVTGVVLDLEPGALRELHWHPNADEWQYVIDGNISVTMFGSHGRYRTEQMEKGDVGYIPQGYGHSIENVGDRPCRVLIGFNTGNYQAIDLSQWIAGNPADVLATNFSKPTSLFEKFPKQDVFIAPGK

SEQ ID NO: 711 - DNA, 1077 bp, synthetic construct
  misc_feature 1..1077: note = Variant of oxalate decarboxylase from Gemmata sp. SH-PL17
  source 1..1077: mol_type = other DNA
atgggtgaccctacctttatgaacaatgtaccagaccctgtgctgtcgggcaaagatttgccgacgttcaagtttgaactggaaaagagcaagggcaaagtcattgggaaaagttcgggaaaagaagcaaccgttgtccagttacctatctccaaaggcattgctggtgtgagcatgacccttgaaccgggtgcgatgcgcgaattgcactggcatgccacagcagcagagtgggggttcgtattaaccggccacgtccgtacgacggtgatcgatccacaaggtgcggccgaaaccaacgactttggaccgggcgacgtgtggtattttcctcgcggtcatgggcacatgctggaatgcctgggcgataaaccggcgcatttcattctgatcttcgataacggctacttctcagagtttggcaccttctctattactgactggatcggtcacacaccgaaagcgcttctcgccaagaactttggtctgcccgaatcggcttttgatgggtttcccaaaaaagaggtctattttgcacgtggcgcggttccaccagccacccctgcagcgcctttacagggactgaagctgccaccaaatacgcataaatacgaactcctcgaacaagaacctcacaaagtttttaaaggtggtcgtgaatggcgcgtggatagctcgcgttttcccatttccaagactgtaaccggcgttgttcttgatttggaacccggcgcgttacgcgagcttcactggcatcctaatgctgacgagtggcaatatgtgatcgatggcaacattagtgtgacgatgttcggttctcatggccgttaccgcaccgaacagatggagaagggtgatgtcgggtatattccacaggggtatggccacagcatcgaaaatgttggagatcgtccttgtcgcgtcttgattggctttaacacaggtaactaccaagcgatcgacttatcacagtggattgcaggtaatcccgcggatgttcttgccacgaacttctccaaacccaccagcctctttgaaaagttcccaaaacaggacgtgtttattgctcctggcaag

SEQ ID NO: 712 - protein, 359 aa, synthetic construct
  REGION 1..359: note = Variant of oxalate decarboxylase from Gemmata sp. SH-PL17
MGDPTFMNNVPDPVLSGKDLPTFKFELEKSKGKVIGKSSGKEATVVQLPISKGIAGVSMTLEPGAMRELHWHATAAEWGFVLTGHVRTTVIDPQGAAETNDFGPGDVWYFPRGHGHMLECLGDKPAHFILIFDNGYFSEFGTFSITDWIGHTPKALLAKNFGLPESAFDGFPKKEVYFARGAVPPATPAAPLQGLKLPPNTHKYELLEQEPHKVFKGGREWRVDSSRFPISKTVTGVVLDLEPGALRELHWHPNADEWQYVIDGNISVTMFGSHGRYRTEQMEKGDVGYIPQGYGHSIENVGDRPCRVLIGFNTGNYQAIDLSQWIAGNPADVLATNFSKPTSLFEKFPKQDVFIAPGK

SEQ ID NO: 713 - DNA, 1077 bp, synthetic construct
  misc_feature 1..1077: note = Variant of oxalate decarboxylase from Gemmata sp. SH-PL17
  source 1..1077: mol_type = other DNA
atgggtgaccctacctttatgaacaatgtaccagaccctgtgctgtcgggcaaagatttgccgacgttcaagtttgaactggaaaagagcaagggcaaagtcattgggaaaagttcgggaaaagaagcaaccgttgtccagttacctatctccaaaggcattgctggtgtgagcatgacccttgaaccgggtgcgatgcgcgaattgcactggcatgccacagcagcagagtgggggttcgtattaaccggccacgtccgtacgacggtgatcgatccacaaggtgcggccgaaaccaacgactttggaccgggcgacgtgtggtattttcctcgcggtcatgggcacatgctggaatgcctgggcgataaaccggcgcatttcattctgatcttcgataacggctacttctcagagtttggcaccttctctattactgactggatcggtcacacaccgaaagcgcttctcgccaagaactttggtctgcccgaatcggcttttgatgggtttcccaaaaaagaggtctattttgcacgtggcgcggttccaccagccacccctgcagcgcctttacagggactgaagctgccaccactcacgcataaatacgaactcctcgaacaagaacctcacaaagtttttaaaggtggtcgtgaatggcgcgtggatagctcgcgttttcccatttccaagactgtaaccggcgttgttcttgatttggaacccggcgcgttacgcgagcttcactggcatcctaatgctgacgagtggcaatatgtgatcgatggcaacattagtgtgacgatgttcggttctcatggccgttaccgcaccgaacagatggagaagggtgatgtcgggtatattccacaggggtatggccacagcatcgaaaatgttggagatcgtccttgtcgcgtcttgattggctttaacacaggtaactaccaagcgatcgacttatcacagtggattgcaggtaatcccgcggatgttcttgccacgaacttctccaaacccgagagcctctttgaaaagttcccaaaacaggacgtgtttattgctcctggcaag

SEQ ID NO: 714 - protein, 359 aa, synthetic construct
  REGION 1..359: note = Variant of oxalate decarboxylase from Gemmata sp. SH-PL17
MGDPTFMNNVPDPVLSGKDLPTFKFELEKSKGKVIGKSSGKEATVVQLPISKGIAGVSMTLEPGAMRELHWHATAAEWGFVLTGHVRTTVIDPQGAAETNDFGPGDVWYFPRGHGHMLECLGDKPAHFILIFDNGYFSEFGTFSITDWIGHTPKALLAKNFGLPESAFDGFPKKEVYFARGAVPPATPAAPLQGLKLPPLTHKYELLEQEPHKVFKGGREWRVDSSRFPISKTVTGVVLDLEPGALRELHWHPNADEWQYVIDGNISVTMFGSHGRYRTEQMEKGDVGYIPQGYGHSIENVGDRPCRVLIGFNTGNYQAIDLSQWIAGNPADVLATNFSKPESLFEKFPKQDVFIAPGK

SEQ ID NO: 715 - DNA, 1077 bp, synthetic construct
  misc_feature 1..1077: note = Variant of oxalate decarboxylase from Gemmata sp. SH-PL17
  source 1..1077: mol_type = other DNA
atgggtgaccctacctttatgaacaatgtaccagaccctgtgctgtcgggcaaagatttgccgacgttcaagtttgaactggaaaagagcaagggcaaagtcattgggaaaagttcgggaaaagaagcaaccgttgtccagttacctatctccaaaggcattgctggtgtgagcatgacccttgaaccgggtgcgatgcgcgaattgcactggcatgccacagcagcagagtgggggttcgtattaaccggccacgtccgtacgacggtgatcgatccacaaggtgcggccgaaaccaacgactttggaccgggcgacgtgtggtattttcctcgcggtcatgggcacatgctggaatgcctgggcgataaaccggcgcatttcattctgatcttcgataacggctacttctcagagtttggcaccttctctattactgactggatcggtcacacaccgaaagcgcttctcgccaagaactttggtctgcccgaatcggcttttgatgggtttcccaaaaaagaggtctattttgcacgtggcgcggttccaccagccacccctgcagcgcctttacagggactgaagctgccaccactcacgcataaatacgaactcctcgggcaagaacctcacaaagtttttaaaggtggtcgtgaatggcgcgtggatagctcgcgttttcccatttccaagactgtaaccggcgttgttcttgatttggaacccggcgcgttacgcgagcttcactggcatcctaatgctgacgagtggcaatatgtgatcgatggcaacattagtgtgacgatgttcggttctcatggccgttaccgcaccgaacagatggagaagggtgatgtcgggtatattccacaggggtatggccacagcatcgaaaatgttggagatcgtccttgtcgcgtcttgattggctttaacacaggtaactaccaagcgatcgacttatcacagtggattgcaggtaatcccgcggatgttcttgccacgaacttctccaaacccaccagcctctttgaaaagttcccaaaacaggacgtgtttattgctcctggcaag

SEQ ID NO: 716 - protein, 359 aa, synthetic construct
  REGION 1..359: note = Variant of oxalate decarboxylase from Gemmata sp. SH-PL17
MGDPTFMNNVPDPVLSGKDLPTFKFELEKSKGKVIGKSSGKEATVVQLPISKGIAGVSMTLEPGAMRELHWHATAAEWGFVLTGHVRTTVIDPQGAAETNDFGPGDVWYFPRGHGHMLECLGDKPAHFILIFDNGYFSEFGTFSITDWIGHTPKALLAKNFGLPESAFDGFPKKEVYFARGAVPPATPAAPLQGLKLPPLTHKYELLGQEPHKVFKGGREWRVDSSRFPISKTVTGVVLDLEPGALRELHWHPNADEWQYVIDGNISVTMFGSHGRYRTEQMEKGDVGYIPQGYGHSIENVGDRPCRVLIGFNTGNYQAIDLSQWIAGNPADVLATNFSKPTSLFEKFPKQDVFIAPGK

SEQ ID NO: 717 - DNA, 1077 bp, synthetic construct
  misc_feature 1..1077: note = Variant of oxalate decarboxylase from Gemmata sp. SH-PL17
  source 1..1077: mol_type = other DNA
atgggtgaccctacctttatgaacaatgtaccagaccctgtgctgtcgggcaaagatttgccgacgttcaagtttgaactggaaaagagcaagggcaaagtcattgggaaaagttcgggaaaagaagcaaccgttgtccagttacctatctccaaaggcattgctggtgtgagcatgacccttgaaccgggtgcgatgcgcgaattgcactggcatgccacagcagcagagtgggggttcgtattaaccggccacgtccgtacgacggtgatcgatccacaaggtgcggccgaaaccaacgactttggaccgggcgacgtgtggtattttcctcgcggtcatgggcacatgctggaatgcctgggcgataaaccggcgcatttcattctgatcttcgataacggctacttctcagagtttggcaccttctctattactgactggatcggtcacacaccgaaagcgcttctcgccaagaactttggtctgcccgaatcggcttttgctgggtttcccaaaaaagaggtctattttgcacgtggcgcggttccaccagccacccctgcagcgcctttacagggactgaagctgccaccactcacgcataaatacgaactcctcgaacaagaacctcacaaagtttttaaaggtggtcgtgaatggcgcgtggatagctcgcgttttcccatttccaagactgtaaccggcgttgttcttgatttggaacccggcgcgttacgcgagcttcactggcatcctaatgctgacgagtggcaatatgtgatcgatggcaacattagtgtgacgatgttcggttctcatggccgttaccgcaccgaacagatggagaagggtgatgtcgggtatattccacaggggtatggccacagcatcgaaaatgttggagatcgtccttgtcgcgtcttgattggctttaacacaggtaactaccaagcgatcgacttatcacagtggattgcaggtaatcccgcggatgttcttgccacgaacttctccaaacccaccagcctctttgaaaagttcccaaaacaggacgtgtttattgctcctggcaag

SEQ ID NO: 718 - protein, 359 aa, synthetic construct
  REGION 1..359: note = Variant of oxalate decarboxylase from Gemmata sp. SH-PL17
MGDPTFMNNVPDPVLSGKDLPTFKFELEKSKGKVIGKSSGKEATVVQLPISKGIAGVSMTLEPGAMRELHWHATAAEWGFVLTGHVRTTVIDPQGAAETNDFGPGDVWYFPRGHGHMLECLGDKPAHFILIFDNGYFSEFGTFSITDWIGHTPKALLAKNFGLPESAFAGFPKKEVYFARGAVPPATPAAPLQGLKLPPLTHKYELLEQEPHKVFKGGREWRVDSSRFPISKTVTGVVLDLEPGALRELHWHPNADEWQYVIDGNISVTMFGSHGRYRTEQMEKGDVGYIPQGYGHSIENVGDRPCRVLIGFNTGNYQAIDLSQWIAGNPADVLATNFSKPTSLFEKFPKQDVFIAPGK

SEQ ID NO: 719 - DNA, 1077 bp, synthetic construct
  misc_feature 1..1077: note = Variant of oxalate decarboxylase from Gemmata sp. SH-PL17
  source 1..1077: mol_type = other DNA
atgggtgaccctacctttatgaacaatgtaccagaccctgtgctgtcgggcaaagatttgccgacgttcaagtttgaactggaaaagagcaagggcaaagtcattgggaaaagttcgggaaaagaagcaaccgttgtccagttacctatctccaaaggcattgctggtgtgagcatgacccttgaaccgggtgcgatgcgcgaattgcactggcatgccacagcagcagagtgggggttcgtattaaccggccacgtccgtacgacggtgatcgatccacaaggtgcggccgaaaccaacgactttggaccgggcgacgtgtggtattttcctcgcggtcatgggcacatgctggaatgcctgggcgataaaccggcgcatttcattctgatcttcgataacggctacttctcagagtttggcaccttctctattactgactggatcggtcacacaccgaaagcgcttctcgccaagaactttggtctgcccgaatcggcttttgatgggtttcccaaaaaagaggtctattttgcacgtggcgcggttccaccagccacccctgcagggcctttacagggactgaagctgccaccactcacgcataaatacgaactcctcgaacaagaacctcacaaagtttttaaaggtggtcgtgaatggcgcgtggatagctcgcgttttcccatttccaagactgtaaccggcgttgttcttgatttggaacccggcgcgttacgcgagcttcactggcatcctaatgctgacgagtggcaatatgtgatcgatggcaacattagtgtgacgatgttcggttctcatggccgttaccgcaccgaacagatggagaagggtgatgtcgggtatattccacaggggtatggccacagcatcgaaaatgttggagatcgtccttgtcgcgtcttgattggctttaacacaggtaactaccaagcgatcgacttatcacagtggattgcaggtaatcccgcggatgttcttgccacgaacttctccaaacccaccagcctctttgaaaagttcccaaaacaggacgtgtttattgctcctggcaag

SEQ ID NO: 720 - protein, 359 aa, synthetic construct
  REGION 1..359: note = Variant of oxalate decarboxylase from Gemmata sp. SH-PL17
MGDPTFMNNVPDPVLSGKDLPTFKFELEKSKGKVIGKSSGKEATVVQLPISKGIAGVSMTLEPGAMRELHWHATAAEWGFVLTGHVRTTVIDPQGAAETNDFGPGDVWYFPRGHGHMLECLGDKPAHFILIFDNGYFSEFGTFSITDWIGHTPKALLAKNFGLPESAFDGFPKKEVYFARGAVPPATPAGPLQGLKLPPLTHKYELLEQEPHKVFKGGREWRVDSSRFPISKTVTGVVLDLEPGALRELHWHPNADEWQYVIDGNISVTMFGSHGRYRTEQMEKGDVGYIPQGYGHSIENVGDRPCRVLIGFNTGNYQAIDLSQWIAGNPADVLATNFSKPTSLFEKFPKQDVFIAPGK

SEQ ID NO: 721 - DNA, 1077 bp, synthetic construct
  misc_feature 1..1077: note = Variant of oxalate decarboxylase from Gemmata sp. SH-PL17
  source 1..1077: mol_type = other DNA
atgggtgaccctacctttatgaacaatgtaccagaccctgtgctgtcgggcaaagatttgccgacgttcaagtttgaactggaaaagagcaagggcaaagtcattgggaaaagttcgggaaaagaagcaaccgttgtccagttacctatctccaaaggcattgctggtgtgagcatgacccttgaaccgggtgcgatgcgcgaattgcactggcatgccacagcagcagagtgggggttcgtattaaccggccacgtccgtacgacggtgatcgatccacaaggtgcggccgaaaccaacgactttggaccgggcgacgtgtggtattttcctcgcggtcatgggcacatgctggaatgcctgggcgataaaccggcgcatttcattctgatcttcgataacggctacttctcagagtttggcaccttctctattactgactggatcggtcacacaccgaaagcgcttctcgccaagaactttggtctgcccgaatcggcttttgatgggtttcccaaaaaagaggtctattttgcacgtggcgcggttccaccagccacccctgcagcgcctttacagggactgaagctgccaccactcacgcataaatacgaactcctcgaacaagaacctcacaaagtttttaaaggtggtcgtgaatggcgcgtggatagctcgcgttttcccatttccaagactgtaaccggcgttgttcttgatttggaacccggcgcgttacgcgagcttcactggcatcctaatgctgacgagtggcaatatgtgatcgatggcaacattagtgtgacgatgttcggttctcatggccgttaccgcaccgaacagatggaggcgggtgatgtcgggtatattccacaggggtatggccacagcatcgaaaatgttggagatcgtccttgtcgcgtcttgattggctttaacacaggtaactaccaagcgatcgacttatcacagtggattgcaggtaatcccgcggatgttcttgccacgaacttctccaaacccaccagcctctttgaaaagttcccaaaacaggacgtgtttattgctcctggcaag

SEQ ID NO: 722 - protein, 359 aa, synthetic construct
  REGION 1..359: note = Variant of oxalate decarboxylase from Gemmata sp. SH-PL17
MGDPTFMNNVPDPVLSGKDLPTFKFELEKSKGKVIGKSSGKEATVVQLPISKGIAGVSMTLEPGAMRELHWHATAAEWGFVLTGHVRTTVIDPQGAAETNDFGPGDVWYFPRGHGHMLECLGDKPAHFILIFDNGYFSEFGTFSITDWIGHTPKALLAKNFGLPESAFDGFPKKEVYFARGAVPPATPAAPLQGLKLPPLTHKYELLEQEPHKVFKGGREWRVDSSRFPISKTVTGVVLDLEPGALRELHWHPNADEWQYVIDGNISVTMFGSHGRYRTEQMEAGDVGYIPQGYGHSIENVGDRPCRVLIGFNTGNYQAIDLSQWIAGNPADVLATNFSKPTSLFEKFPKQDVFIAPGK

SEQ ID NO: 723 - DNA, 1077 bp, synthetic construct
  misc_feature 1..1077: note = Variant of oxalate decarboxylase from Gemmata sp. SH-PL17
  source 1..1077: mol_type = other DNA
atgggtgaccctacctttatgaacaatgtaccagaccctgtgctgtcgggcaaagatttgccgacgttcaagtttgaactggaaaagagcaagggcaaagtcattgggaaaagttcgggaaaagaagcaaccgttgtccagttacctatctccaaaggcattgctggtgtgagcatgacccttgaaccgggtgcgatgcgcgaattgcactggcatgccacagcagcagagtgggggttcgtattaaccggccacgtccgtacgacggtgatcgatccacaaggtgcggccgaaaccaacgactttggaccgggcgacgtgtggtattttcctcgcggtcatgggcacatgctggaatgcctgggcgataaaccggcgcatttcattctgatcttcgataacggctacttctcagagtttggcaccttctctattactgactggatcggtcacacaccgaaagcgcttctcgccaagaactttggtctgcccgaatcggcttttgatgggtttcccaaaaaagaggtctattttgcacgtggcgcggttccaccagccacccctgcagcgcctttacagggactgaagctgccagggctcacgcataaatacgaactcctcgaacaagaacctcacaaagtttttaaaggtggtcgtgaatggcgcgtggatagctcgcgttttcccatttccaagactgtaaccggcgttgttcttgatttggaacccggcgcgttacgcgagcttcactggcatcctaatgctgacgagtggcaatatgtgatcgatggcaacattagtgtgacgatgttcggttctcatggccgttaccgcaccgaacagatggagaagggtgatgtcgggtatattccacaggggtatggccacagcatcgaaaatgttggagatcgtccttgtcgcgtcttgattggctttaacacaggtaactaccaagcgatcgacttatcacagtggattgcaggtaatcccgcggatgttcttgccacgaacttctccaaacccaccagcctctttgaaaagttcccaaaacaggacgtgtttattgctcctggcaag

SEQ ID NO: 724 - protein, 359 aa, synthetic construct
  REGION 1..359: note = Variant of oxalate decarboxylase from Gemmata sp. SH-PL17
MGDPTFMNNVPDPVLSGKDLPTFKFELEKSKGKVIGKSSGKEATVVQLPISKGIAGVSMTLEPGAMRELHWHATAAEWGFVLTGHVRTTVIDPQGAAETNDFGPGDVWYFPRGHGHMLECLGDKPAHFILIFDNGYFSEFGTFSITDWIGHTPKALLAKNFGLPESAFDGFPKKEVYFARGAVPPATPAAPLQGLKLPGLTHKYELLEQEPHKVFKGGREWRVDSSRFPISKTVTGVVLDLEPGALRELHWHPNADEWQYVIDGNISVTMFGSHGRYRTEQMEKGDVGYIPQGYGHSIENVGDRPCRVLIGFNTGNYQAIDLSQWIAGNPADVLATNFSKPTSLFEKFPKQDVFIAPGK

SEQ ID NO: 725 - DNA, 1077 bp, synthetic construct
  misc_feature 1..1077: note = Variant of oxalate decarboxylase from Gemmata sp. SH-PL17
  source 1..1077: mol_type = other DNA
atgggtgaccctacctttatgaacaatgtaccagaccctgtgctgtcgggcaaagatttgccgacgttcaagtttgaactggaaaagagcaagggcaaagtcattgggaaaagttcgggaaaagaagcaaccgttgtccagttacctatctccaaaggcattgctggtgtgagcatgacccttgaaccgggtgcgatgcgcgaattgcactggcatgccacagcagcagagtgggggttcgtattaaccggccacgtccgtacgacggtgatcgatccacaaggtgcggccgaaaccaacgactttggaccgggcgacgtgtggtattttcctcgcggtcatgggcacatgctggaatgctggggcgataaaccggcgcatttcattctgatcttcgataacggctacttctcagagtttggcaccttctctattactgactggatcggtcacacaccgaaagcgcttctcgccaagaactttggtctgcccgaatcggcttttgatgggtttcccaaaaaagaggtctattttgcacgtggcgcggttccaccagccacccctgcagcgcctttacagggactgaagctgccaccactcacgcataaatacgaactcctcgaacaagaacctcacaaagtttttaaaggtggtcgtgaatggcgcgtggatagctcgcgttttcccatttccaagactgtaaccggcgttgttcttgatttggaacccggcgcgttacgcgagcttcactggcatcctaatgctgacgagtggcaatatgtgatcgatggcaacattagtgtgacgatgttcggttctcatggccgttaccgcaccgaacagatggagaagggtgatgtcgggtatattccacaggggtatggccacagcatcgaaaatgttggagatcgtccttgtcgcgtcttgattggctttaacacaggtaactaccaagcgatcgacttatcacagtggattgcaggtaatcccgcggatgttcttgccacgaacttctccaaacccaccagcctctttgaaaagttcccaaaacaggacgtgtttattgctcctggcaag

SEQ ID NO: 726 - protein, 359 aa, synthetic construct
  REGION 1..359: note = Variant of oxalate decarboxylase from Gemmata sp. SH-PL17
MGDPTFMNNVPDPVLSGKDLPTFKFELEKSKGKVIGKSSGKEATVVQLPISKGIAGVSMTLEPGAMRELHWHATAAEWGFVLTGHVRTTVIDPQGAAETNDFGPGDVWYFPRGHGHMLECWGDKPAHFILIFDNGYFSEFGTFSITDWIGHTPKALLAKNFGLPESAFDGFPKKEVYFARGAVPPATPAAPLQGLKLPPLTHKYELLEQEPHKVFKGGREWRVDSSRFPISKTVTGVVLDLEPGALRELHWHPNADEWQYVIDGNISVTMFGSHGRYRTEQMEKGDVGYIPQGYGHSIENVGDRPCRVLIGFNTGNYQAIDLSQWIAGNPADVLATNFSKPTSLFEKFPKQDVFIAPGK

SEQ ID NO: 727 - DNA, 1077 bp, synthetic construct
  misc_feature 1..1077: note = Variant of oxalate decarboxylase from Gemmata sp. SH-PL17
  source 1..1077: mol_type = other DNA
atgggtgaccctacctttatgaacaatgtaccagaccctgtgctgtcgggcaaagatttgccgacgttcaagtttgaactggaaaagagcaagggcaaagtcattgggaaaagttcgggaaaagaagcaaccgttgtccagttacctatctccaaaggcattgctggtgtgagcatgacccttgaaccgggtgcgatgcgcgaattgcactggcatgccacagcagcagagtgggggttcgtattaaccggccacgtccgtacgacggtgatcgatccacaaggtgcggccgaaaccaacgactttggaccgggcgacgtgtggtattttcctcgcggtcatgggcacatgctggaatgcctgggcgataaaccggcgcatttcattctgatcttcgataacggctacttctcagagtttggcaccttctctattactgactggatcggtcacacaccgaaagcgcttctcgccaagaactttggtctgcccgaatcggcttttgatgggtttcccaaaaaagaggtctattttgcacgtggcgcggttccaccagccacccctgcagcgcctttacagggactgagtctgccaccactcacgcataaatacgaactcctcgaacaagaacctcacaaagtttttaaaggtggtcgtgaatggcgcgtggatagctcgcgttttcccatttccaagactgtaaccggcgttgttcttgatttggaacccggcgcgttacgcgagcttcactggcatcctaatgctgacgagtggcaatatgtgatcgatggcaacattagtgtgacgatgttcggttctcatggccgttaccgcaccgaacagatggagaagggtgatgtcgggtatattccacaggggtatggccacagcatcgaaaatgttggagatcgtccttgtcgcgtcttgattggctttaacacaggtaactaccaagcgatcgacttatcacagtggattgcaggtaatcccgcggatgttcttgccacgaacttctccaaacccaccagcctctttgaaaagttcccaaaacaggacgtgtttattgctcctggcaag

SEQ ID NO: 728 - protein, 359 aa, synthetic construct
  REGION 1..359: note = Variant of oxalate decarboxylase from Gemmata sp. SH-PL17
MGDPTFMNNVPDPVLSGKDLPTFKFELEKSKGKVIGKSSGKEATVVQLPISKGIAGVSMTLEPGAMRELHWHATAAEWGFVLTGHVRTTVIDPQGAAETNDFGPGDVWYFPRGHGHMLECLGDKPAHFILIFDNGYFSEFGTFSITDWIGHTPKALLAKNFGLPESAFDGFPKKEVYFARGAVPPATPAAPLQGLSLPPLTHKYELLEQEPHKVFKGGREWRVDSSRFPISKTVTGVVLDLEPGALRELHWHPNADEWQYVIDGNISVTMFGSHGRYRTEQMEKGDVGYIPQGYGHSIENVGDRPCRVLIGFNTGNYQAIDLSQWIAGNPADVLATNFSKPTSLFEKFPKQDVFIAPGK

SEQ ID NO: 729 - DNA, 1077 bp, synthetic construct
  misc_feature 1..1077: note = Variant of oxalate decarboxylase from Gemmata sp. SH-PL17
  source 1..1077: mol_type = other DNA
atgggtgaccctacctttatgaacaatgtaccagaccctctgctgtcgggcaaagatttgccgacgttcaagtttgcgctggaaaagagcaagggcaaagtcattggggggagttcgggaaaagaagcaaccgttgtccagttacctatctccaaaggcattgctggtgtgagcatggtacttgaaccgggtgcgatgcgcgaattgcactggcatgccacagcagcagagtgggggttcgtattaaccggccacgtccgtacgacggtgatcgatccacagggtgcggccgaaaccaacgactttggaccgggcgacgtgtggtattttcctcgcggtcatgggcacatgctggaatgcctgggcgataaaccggcgcatttcattctgatcttcgataacggctacttctcagagtttggcaccttctctattactgactggatcggtcacacaccgaaagcgcttctcgccaagaactttggcctgcccgaatcggcttttgatgggtttcccaaaaaagaggtctattttgcacgtggcgcggttccaccagccacccctgcagcgcctttacagggactgaagctgccaccactcacgcataaatacgaactcctcgaacaagaacctcacaaagtttttaaaggtggtcgtgaatggcgcgtggatagcagtcgttttcccatttccaagactgtaaccggcgttgttcttgatttggaacccggcgcgttacgcgagcttcactggcatcctaatgctgacgagtggcaatatgtgatcgatggcaacattagtgtgacgatgttcggttctcatggccgttaccgcaccgaacagatggagaagggtgatgtcgggtatattccacaggggtatggccacagcatcgaaaatgttggagatcgtccttgtcgcgtcttgattggctttaacacaggtaactacgaagcgatcgacttatcacagtggattgcaggtaatcccgcggatgttcttgccacgaacttctccaaacccaccagcctctttgaaaagttcccaaaacaggacgtgtttattgctcctggcaag

SEQ ID NO: 730 - protein, 359 aa, synthetic construct
  REGION 1..359: note = Variant of oxalate decarboxylase from Gemmata sp. SH-PL17
MGDPTFMNNVPDPLLSGKDLPTFKFALEKSKGKVIGGSSGKEATVVQLPISKGIAGVSMVLEPGAMRELHWHATAAEWGFVLTGHVRTTVIDPQGAAETNDFGPGDVWYFPRGHGHMLECLGDKPAHFILIFDNGYFSEFGTFSITDWIGHTPKALLAKNFGLPESAFDGFPKKEVYFARGAVPPATPAAPLQGLKLPPLTHKYELLEQEPHKVFKGGREWRVDSSRFPISKTVTGVVLDLEPGALRELHWHPNADEWQYVIDGNISVTMFGSHGRYRTEQMEKGDVGYIPQGYGHSIENVGDRPCRVLIGFNTGNYEAIDLSQWIAGNPADVLATNFSKPTSLFEKFPKQDVFIAPGK

SEQ ID NO: 731 - DNA, 1077 bp, synthetic construct
  misc_feature 1..1077: note = Variant of oxalate decarboxylase from Gemmata sp. SH-PL17
  source 1..1077: mol_type = other DNA
atgggtgaccctacctttatgaacaatgtaccagaccctctgctgtcgggcaaagatttgccgacgttcaagtttgcgctggaaaagagcaagggcaaagtcattggggggagttcgggaaaagaagcaaccgttgtccagttacctatctccaaaggcattgctggtgtgagcatggtacttgaaccgggtgcgatgcgcgaattgcactggcatgccacagcagcagagtgggggttcgtattaaccggccacgtccgtacgacggtgatcgatccaactggtgcggccgaaaccaacgactttggaccgggcgacgtgtggtattttcctcgcggtcatgggcacatgctggaatgcctgggcgataaaccggcgcatttcattctgatcttcgataacggctacttctcagagtttggcaccttctctattactgactggatcggtcacacaccgaaagcgcttctcgccaagaactttaagctgcccgaatcggcttttgatgggtttcccaaaaaagaggtctattttgcacgtggcgcggttccaccagccacccctgcagcgcctttacagggactgaagctgccaccactcacgcataaatacgaactcctcgaacaagaaccttcgaaagtttttaaaggtggtcgtgaatggcgcgtggatagcagtcgttttcccatttccaagactgtaaccggcgttgttcttgatttggaacccggcgcgttacgcgagcttcactggcatcctaatgctgacgagtggcaatatgtgatcgatggcaacattagtgtgacgatgttcggttctcatggccgttaccgcaccgaacagatggagaagggtgatgtcgggtatattccacaggggtatggccacagcatcgaaaatgttggagatcgtccttgtcgcgtcttgattggctttaacacaggtaactaccaagcgatcgacttatcacagtggattgcaggtaatcccgcggatgttcttgccacgaacttctccaaacccaccagcctctttgaaaagttcccaaaacaggacgtgtttattgctcctggcaag

SEQ ID NO: 732 - protein, 359 aa, synthetic construct
  REGION 1..359: note = Variant of oxalate decarboxylase from Gemmata sp. SH-PL17
MGDPTFMNNVPDPLLSGKDLPTFKFALEKSKGKVIGGSSGKEATVVQLPISKGIAGVSMVLEPGAMRELHWHATAAEWGFVLTGHVRTTVIDPTGAAETNDFGPGDVWYFPRGHGHMLECLGDKPAHFILIFDNGYFSEFGTFSITDWIGHTPKALLAKNFKLPESAFDGFPKKEVYFARGAVPPATPAAPLQGLKLPPLTHKYELLEQEPSKVFKGGREWRVDSSRFPISKTVTGVVLDLEPGALRELHWHPNADEWQYVIDGNISVTMFGSHGRYRTEQMEKGDVGYIPQGYGHSIENVGDRPCRVLIGFNTGNYQAIDLSQWIAGNPADVLATNFSKPTSLFEKFPKQDVFIAPGK

SEQ ID NO: 733 - DNA, 1077 bp, synthetic construct
  misc_feature 1..1077: note = Variant of oxalate decarboxylase from Gemmata sp. SH-PL17
  source 1..1077: mol_type = other DNA
atgggtgaccctacctttatgaacaatgtaccagaccctgtgctgtcgggcaaagatttgccgacgttcaagtttgagctggaaaagagcaagggcaaagtcattggggggagttcgggaaaagaagcaaccgttgtccagttacctatctccaaaggcattgctggtgtgagcatggtacttgaaccgggtgcgatgcgcgaattgcactggcatgccacagcagcagagtgggggttcgtattaaccggccacgtccgtacgacggtgatcgatccacagggtgcggccgaaaccaacgactttggaccgggcgacgtgtggtattttcctcgcggtcatgggcacatgctggaatgcctgggcgataaaccggcgcatttcattctgatcttcgataacggctacttctcagagtttggcaccttctctattactgactggatcggtcacacaccgaaagcgcttctcgccaagaactttaagctgcccgaatcggcttttgatgggtttcccaaaaaagaggtctattttgcacgtggcgcggttccaccagccacccctgcagcgcctttacagggactgaagctgccaccactcacgcataaatacgaactcctcgaacaagaacctcacaaagtttttaaaggtggtcgtgaatggcgcgtggatagcactcgttttcccatttccaagactgtaaccggcgttgttcttgatttggaacccggcgcgttacgcgagcttcactggcatcctaatgctgacgagtggcaatatgtgatcgatggcaacattagtgtgacgatgttcggttctcatggccgttaccgcaccgaacagatggagaagggtgatgtcgggtatattccacaggggtatggccacagcatcgaaaatgttggagatcgtccttgtcgcgtcttgattggctttaacacaggtaactaccaagcgatcgacttatcacagtggattgcaggtaatcccgcggatgttcttgccacgaacttctccaaacccaccagcctctttgaaaagttcccaaaacaggacgtgtttattgctcctggcaag

SEQ ID NO: 734 - protein, 359 aa, synthetic construct
  REGION 1..359: note = Variant of oxalate decarboxylase from Gemmata sp. SH-PL17
MGDPTFMNNVPDPVLSGKDLPTFKFELEKSKGKVIGGSSGKEATVVQLPISKGIAGVSMVLEPGAMRELHWHATAAEWGFVLTGHVRTTVIDPQGAAETNDFGPGDVWYFPRGHGHMLECLGDKPAHFILIFDNGYFSEFGTFSITDWIGHTPKALLAKNFKLPESAFDGFPKKEVYFARGAVPPATPAAPLQGLKLPPLTHKYELLEQEPHKVFKGGREWRVDSTRFPISKTVTGVVLDLEPGALRELHWHPNADEWQYVIDGNISVTMFGSHGRYRTEQMEKGDVGYIPQGYGHSIENVGDRPCRVLIGFNTGNYQAIDLSQWIAGNPADVLATNFSKPTSLFEKFPKQDVFIAPGK

SEQ ID NO: 735 - DNA, 1077 bp, synthetic construct
  misc_feature 1..1077: note = Variant of oxalate decarboxylase from Gemmata sp. SH-PL17
  source 1..1077: mol_type = other DNA
atgggtgaccctacctttatgaacaatgtaccagaccctgtgctgtcgggcaaagatttgccgacgttcaagtttgaactggaaaagagcaagggcaaagtcattggggggagttcgggaaaagaagcaaccgttgtccagttacctatctccaaaggcattgctggtgtgagcatggtacttgaaccgggtgcgatgcgcgaattgcactggcatgccacagcagcagagtgggggttcgtattaaccggccacgtccgtacgacggtgatcgatccacaaggtgcggccgaaaccaacgactttggaccgggcgacgtgtggtattttcctcgcggtcatgggcacatgctggaatgcctgggcgataaaccggcgcatttcattctgatcttcgataacggctacttctcagagtttggcaccttctctattactgactggatcggtcacacaccgaaagcgcttctcgccaagaactttggtctgcccgaatcggcttttgatgggtttcccaaaaaagaggtctattttgcacgtggcgcggttccaccagccacccctgcagcgcctttacagggactgaagctgccaccactcacgcataaatacgaactcctcgaacaagaacctcacaaagtttttaaaggtggtcgtgaatggcgcgtggatagcagtcgttttcccatttccaagactgtaaccggcgttgttcttgatttggaacccggcgcgttacgcgagcttcactggcatcctaatgctgacgagtggcaatatgtgatcgatggcaacattagtgtgacgatgttcggttctcatggccgttaccgcaccgaacagatggagaagggtgatgtcgggtatattccacaggggtatggccacagcatcgaaaatgttggagatcgtccttgtcgcgtcttgattggctttaacacaggtaactaccaagcgatcgacttatcacagtggattgcaggtaatcccgcggatgttcttgccacgaacttctccaaacccaccagcctctttgaaaagttcccaaaacaggacgtgtttattgctcctggcaag

SEQ ID NO: 736 - protein, 359 aa, synthetic construct
  REGION 1..359: note = Variant of oxalate decarboxylase from Gemmata sp. SH-PL17
MGDPTFMNNVPDPVLSGKDLPTFKFELEKSKGKVIGGSSGKEATVVQLPISKGIAGVSMVLEPGAMRELHWHATAAEWGFVLTGHVRTTVIDPQGAAETNDFGPGDVWYFPRGHGHMLECLGDKPAHFILIFDNGYFSEFGTFSITDWIGHTPKALLAKNFGLPESAFDGFPKKEVYFARGAVPPATPAAPLQGLKLPPLTHKYELLEQEPHKVFKGGREWRVDSSRFPISKTVTGVVLDLEPGALRELHWHPNADEWQYVIDGNISVTMFGSHGRYRTEQMEKGDVGYIPQGYGHSIENVGDRPCRVLIGFNTGNYQAIDLSQWIAGNPADVLATNFSKPTSLFEKFPKQDVFIAPGK

SEQ ID NO: 737 - DNA, 1077 bp, synthetic construct
  misc_feature 1..1077: note = Variant of oxalate decarboxylase from Gemmata sp. SH-PL17
  source 1..1077: mol_type = other DNA
atgggtgaccctacctttatgaacaatgtaccagaccctctgctgtcgggcaaagatttgccgacgttcaagtttgagctggaaaagagcaagggcaaagtcattggggggagttcgggaaaagaagcaaccgttgtccagttacctatctccaaaggcattgctggtgtgagcatgactcttgaaccgggtgcgatgcgcgaattgcactggcatgccacagcagcagagtgggggttcgtattaaccggccacgtccgtacgacggtgatcgatccacagggtgcggccgaaaccaacgactttggaccgggcgacgtgtggtattttcctcgcggtcatgggcacatgctggaatgcctgggcgataaattcgcgcatttcattctgatcttcgataacggctacttctcagagtttggcaccttctctattactgactggatcggtcacacaccgaaagcgcttctcgccaagaactttaagctgcccgaatcggcttttgatgggtttcccaaaaaagaggtctattttgcacgtggcgcggttccaccagccacccctgcagcgcctttacagggactgaagctgccaccactcacgcataaatacgaactcctcgaacaagaaccttcgaaagtttttaaaggtggtcgtgaatggcgcgtggatagcagtcgttttcccatttccaagactgtaaccggcgttgttcttgatttggaacccggcgcgttacgcgagcttcactggcatcctaatgctgacgagtggcaatatgtgatcgatggcaacattagtgtgacgatgttcggttctcatggccgttaccgcaccgaacagatggagaagggtgatgtcgggtatattccacaggggtatggccacagcatcgaaaatgttggagatcgtccttgtcgcgtcttgattggctttaacacaggtaactacgaagcgatcgacttatcacagtggattgcaggtaatcccgcggatgttcttgccacgaacttctccaaacccaccagcctctttgaaaagttcccaaaacaggacgtgtttattgctcctggcaag

SEQ ID NO: 738 - protein, 359 aa, synthetic construct
  REGION 1..359: note = Variant of oxalate decarboxylase from Gemmata sp. SH-PL17
MGDPTFMNNVPDPLLSGKDLPTFKFELEKSKGKVIGGSSGKEATVVQLPISKGIAGVSMTLEPGAMRELHWHATAAEWGFVLTGHVRTTVIDPQGAAETNDFGPGDVWYFPRGHGHMLECLGDKFAHFILIFDNGYFSEFGTFSITDWIGHTPKALLAKNFKLPESAFDGFPKKEVYFARGAVPPATPAAPLQGLKLPPLTHKYELLEQEPSKVFKGGREWRVDSSRFPISKTVTGVVLDLEPGALRELHWHPNADEWQYVIDGNISVTMFGSHGRYRTEQMEKGDVGYIPQGYGHSIENVGDRPCRVLIGFNTGNYEAIDLSQWIAGNPADVLATNFSKPTSLFEKFPKQDVFIAPGK

SEQ ID NO: 739 - DNA, 1077 bp, synthetic construct
  misc_feature 1..1077: note = Variant of oxalate decarboxylase from Gemmata sp. SH-PL17
  source 1..1077: mol_type = other DNA
atgggtgaccctacctttatgaacaatgtaccagaccctgtgctgtcgggcaaagatttgccgacgttcaagtttgagctggaaaagagcaagggcaaagtcattggggggagttcgggaaaagaagcaaccgttgtccagttacctatctccaaaggcattgctggtgtgagcatggtacttgaaccgggtgcgatgcgcgaattgcactggcatgccacagcagcagagtgggggttcgtattaaccggccacgtccgtacgacggtgatcgatccacaaggtgcggccgaaaccaacgactttggaccgggcgacgtgtggtattttcctcgcggtcatgggcacatgctggaatgcctgggcgataaattcgcgcatttcattctgatcttcgataacggctacttctcagagtttggcaccttctctattactgactggatcggtcacacaccgaaagcgcttctcgccaagaactttggcctgcccgaatcggcttttgatgggtttcccaaaaaagaggtctattttgcacgtggcgcggttccaccagccacccctgcagcgcctttacagggactgaagctgccaccactcacgcataaatacgaactcctcgaacaagaacctcacaaagtttttaaaggtggtcgtgaatggcgcgtggatagcactcgttttcccatttccaagactgtaaccggcgttgttcttgatttggaacccggcgcgttacgcgagcttcactggcatcctaatgctgacgagtggcaatatgtgatcgatggcaacattagtgtgacgatgttcggttctcatggccgttaccgcaccgaacagatggagaagggtgatgtcgggtatattccacaggggtatggccacagcatcgaaaatgttggagatcgtccttgtcgcgtcttgattggctttaacacaggtaactaccaagcgatcgacttatcacagtggattgcaggtaatcccgcggatgttcttgccacgaacttctccaaacccaccagcctctttgaaaagttcccaaaacaggacgtgtttattgctcctggcaag

SEQ ID NO: 740 - protein, 359 aa, synthetic construct
  REGION 1..359: note = Variant of oxalate decarboxylase from Gemmata sp. SH-PL17
MGDPTFMNNVPDPVLSGKDLPTFKFELEKSKGKVIGGSSGKEATVVQLPISKGIAGVSMVLEPGAMRELHWHATAAEWGFVLTGHVRTTVIDPQGAAETNDFGPGDVWYFPRGHGHMLECLGDKFAHFILIFDNGYFSEFGTFSITDWIGHTPKALLAKNFGLPESAFDGFPKKEVYFARGAVPPATPAAPLQGLKLPPLTHKYELLEQEPHKVFKGGREWRVDSTRFPISKTVTGVVLDLEPGALRELHWHPNADEWQYVIDGNISVTMFGSHGRYRTEQMEKGDVGYIPQGYGHSIENVGDRPCRVLIGFNTGNYQAIDLSQWIAGNPADVLATNFSKPTSLFEKFPKQDVFIAPGK

SEQ ID NO: 741 - DNA, 1077 bp, synthetic construct
  misc_feature 1..1077: note = Variant of oxalate decarboxylase from Gemmata sp. SH-PL17
  source 1..1077: mol_type = other DNA
atgggtgaccctacctttatgaacaatgtaccagaccctctgctgtcgggcaaagatttgccgacgttcaagtttgaactggaaaagagcaagggcaaagtcattggggggagttcgggaaaagaagcaaccgttgtccagttacctatctccaaaggcattgctggtgtgagcatgactcttgaaccgggtgcgatgcgcgaattgcactggcatgccacagcagcagagtgggggttcgtattaaccggccacgtccgtacgacggtgatcgatccacaaggtgcggccgaaaccaacgactttggaccgggcgacgtgtggtattttcctcgcggtcatgggcacatgctggaatgcctgggcgataaattcgcgcatttcattctgatcttcgataacggctacttctcagagtttggcaccttctctattactgactggatcggtcacacaccgaaagcgcttctcgccaagaactttaagctgcccgaatcggcttttgatgggtttcccaaaaaagaggtctattttgcacgtggcgcggttccaccagccacccctgcagcgcctttacagggactgaagctgccaccactcacgcataaatacgaactcctcgaacaagaacctcacaaagtttttaaaggtggtcgtgaatggcgcgtggatagcactcgttttcccatttccaagactgtaaccggcgttgttcttgatttggaacccggcgcgttacgcgagcttcactggcatcctaatgctgacgagtggcaatatgtgatcgatggcaacattagtgtgacgatgttcggttctcatggccgttaccgcaccgaacagatggagaagggtgatgtcgggtatattccacaggggtatggccacagcatcgaaaatgttggagatcgtccttgtcgcgtcttgattggctttaacacaggtaactaccaagcgatcgacttatcacagtggattgcaggtaatcccgcggatgttcttgccacgaacttctccaaacccaccagcctctttgaaaagttcccaaaacaggacgtgtttattgctcctggcaag

SEQ ID NO: 742 - protein, 359 aa, synthetic construct
  REGION 1..359: note = Variant of oxalate decarboxylase from Gemmata sp. SH-PL17
MGDPTFMNNVPDPLLSGKDLPTFKFELEKSKGKVIGGSSGKEATVVQLPISKGIAGVSMTLEPGAMRELHWHATAAEWGFVLTGHVRTTVIDPQGAAETNDFGPGDVWYFPRGHGHMLECLGDKFAHFILIFDNGYFSEFGTFSITDWIGHTPKALLAKNFKLPESAFDGFPKKEVYFARGAVPPATPAAPLQGLKLPPLTHKYELLEQEPHKVFKGGREWRVDSTRFPISKTVTGVVLDLEPGALRELHWHPNADEWQYVIDGNISVTMFGSHGRYRTEQMEKGDVGYIPQGYGHSIENVGDRPCRVLIGFNTGNYQAIDLSQWIAGNPADVLATNFSKPTSLFEKFPKQDVFIAPGK

SEQ ID NO: 743 - DNA, 1077 bp, synthetic construct
  misc_feature 1..1077: note = Variant of oxalate decarboxylase from Gemmata sp. SH-PL17
  source 1..1077: mol_type = other DNA
atgggtgaccctacctttatgaacaatgtaccagaccctgtgctgtcgggcaaagatttgccgacgttcaagtttgcgctggaaaagagcaagggcaaagtcattggggggagttcgggaaaagaagcaaccgttgtccagttacctatctccaaaggcattgctggtgtgagcatggtacttgaaccgggtgcgatgcgcgaattgcactggcatgccacagcagcagagtgggggttcgtattaaccggccacgtccgtacgacggtgatcgatccacagggtgcggccgaaaccaacgactttggaccgggcgacgtgtggtattttcctcgcggtcatgggcacatgctggaatgcctgggcgataaaccggcgcatttcattctgatcttcgataacggctacttctcagagtttggcaccttctctattactgactggatcggtcacacaccgaaagcgcttctcgccaagaactttaagctgcccgaatcggcttttgatgggtttcccaaaaaagaggtctattttgcacgtggcgcggttccaccagccacccctgcagcgcctttacagggactgaagctgccaccactcacgcataaatacgaactcctcgaacaagaacctcacaaagtttttaaaggtggtcgtgaatggcgcgtggatagcactcgttttcccatttccaagactgtaaccggcgttgttcttgatttggaacccggcgcgttacgcgagcttcactggcatcctaatgctgacgagtggcaatatgtgatcgatggcaacattagtgtgacgatgttcggttctcatggccgttaccgcaccgaacagatggagaagggtgatgtcgggtatattccacaggggtatggccacagcatcgaaaatgttggagatcgtccttgtcgcgtcttgattggctttaacacaggtaactacgaagcgatcgacttatcacagtggattgcaggtaatcccgcggatgttcttgccacgaacttctccaaacccaccagcctctttgaaaagttcccaaaacaggacgtgtttattgctcctggcaag

SEQ ID NO: 744 - protein, 359 aa, synthetic construct
  REGION 1..359: note = Variant of oxalate decarboxylase from Gemmata sp. SH-PL17
MGDPTFMNNVPDPVLSGKDLPTFKFALEKSKGKVIGGSSGKEATVVQLPISKGIAGVSMVLEPGAMRELHWHATAAEWGFVLTGHVRTTVIDPQGAAETNDFGPGDVWYFPRGHGHMLECLGDKPAHFILIFDNGYFSEFGTFSITDWIGHTPKALLAKNFKLPESAFDGFPKKEVYFARGAVPPATPAAPLQGLKLPPLTHKYELLEQEPHKVFKGGREWRVDSTRFPISKTVTGVVLDLEPGALRELHWHPNADEWQYVIDGNISVTMFGSHGRYRTEQMEKGDVGYIPQGYGHSIENVGDRPCRVLIGFNTGNYEAIDLSQWIAGNPADVLATNFSKPTSLFEKFPKQDVFIAPGK

SEQ ID NO: 745 - DNA, 1077 bp, synthetic construct
  misc_feature 1..1077: note = Variant of oxalate decarboxylase from Gemmata sp. SH-PL17
  source 1..1077: mol_type = other DNA
atgggtgaccctacctttatgaacaatgtaccagaccctctgctgtcgggcaaagatttgccgacgttcaagtttgcgctggaaaagagcaagggcaaagtcattggggggagttcgggaaaagaagcaaccgttgtccagttacctatctccaaaggcattgctggtgtgagcatgactcttgaaccgggtgcgatgcgcgaattgcactggcatgccacagcagcagagtgggggttcgtattaaccggccacgtccgtacgacggtgatcgatccaactggtgcggccgaaaccaacgactttggaccgggcgacgtgtggtattttcctcgcggtcatgggcacatgctggaatgcctgggcgataaaccggcgcatttcattctgatcttcgataacggctacttctcagagtttggcaccttctctattactgactggatcggtcacacaccgaaagcgcttctcgccaagaactttaagctgcccgaatcggcttttgatgggtttcccaaaaaagaggtctattttgcacgtggcgcggttccaccagccacccctgcagcgcctttacagggactgaagctgccaccactcacgcataaatacgaactcctcgaacaagaaccttcgaaagtttttaaaggtggtcgtgaatggcgcgtggatagcactcgttttcccatttccaagactgtaaccggcgttgttcttgatttggaacccggcgcgttacgcgagcttcactggcatcctaatgctgacgagtggcaatatgtgatcgatggcaacattagtgtgacgatgttcggttctcatggccgttaccgcaccgaacagatggagaagggtgatgtcgggtatattccacaggggtatggccacagcatcgaaaatgttggagatcgtccttgtcgcgtcttgattggctttaacacaggtaactaccaagcgatcgacttatcacagtggattgcaggtaatcccgcggatgttcttgccacgaacttctccaaacccaccagcctctttgaaaagttcccaaaacaggacgtgtttattgctcctggcaag

SEQ ID NO: 746 - protein, 359 aa, synthetic construct
  REGION 1..359: note = Variant of oxalate decarboxylase from Gemmata sp. SH-PL17
MGDPTFMNNVPDPLLSGKDLPTFKFALEKSKGKVIGGSSGKEATVVQLPISKGIAGVSMTLEPGAMRELHWHATAAEWGFVLTGHVRTTVIDPTGAAETNDFGPGDVWYFPRGHGHMLECLGDKPAHFILIFDNGYFSEFGTFSITDWIGHTPKALLAKNFKLPESAFDGFPKKEVYFARGAVPPATPAAPLQGLKLPPLTHKYELLEQEPSKVFKGGREWRVDSTRFPISKTVTGVVLDLEPGALRELHWHPNADEWQYVIDGNISVTMFGSHGRYRTEQMEKGDVGYIPQGYGHSIENVGDRPCRVLIGFNTGNYQAIDLSQWIAGNPADVLATNFSKPTSLFEKFPKQDVFIAPGK

SEQ ID NO: 747 - DNA, 1077 bp, synthetic construct
  misc_feature 1..1077: note = Variant of oxalate decarboxylase from Gemmata sp. SH-PL17
  source 1..1077: mol_type = other DNA
atgggtgaccctacctttatgaacaatgtaccagaccctctgctgtcgggcaaagatttgccgacgttcaagtttgaactggaaaagagcaagggcaaagtcattggggggagttcgggaaaagaagcaaccgttgtccagttacctatctccaaaggcattgctggtgtgagcatggtacttgaaccgggtgcgatgcgcgaattgcactggcatgccacagcagcagagtgggggttcgtattaaccggccacgtccgtacgacggtgatcgatccacagggtgcggccgaaaccaacgactttggaccgggcgacgtgtggtattttcctcgcggtcatgggcacatgctggaatgcctgggcgataaaccggcgcatttcattctgatcttcgataacggctacttctcagagtttggcaccttctctattactgactggatcggtcacacaccgaaagcgcttctcgccaagaactttaagctgcccgaatcggcttttgatgggtttcccaaaaaagaggtctattttgcacgtggcgcggttccaccagccacccctgcagcgcctttacagggactgaagctgccaccactcacgcataaatacgaactcctcgaacaagaacctcataaagtttttaaaggtggtcgtgaatggcgcgtggatagcagtcgttttcccatttccaagactgtaaccggcgttgttcttgatttggaacccggcgcgttacgcgagcttcactggcatcctaatgctgacgagtggcaatatgtgatcgatggcaacattagtgtgacgatgttcggttctcatggccgttaccgcaccgaacagatggagaagggtgatgtcgggtatattccacaggggtatggccacagcatcgaaaatgttggagatcgtccttgtcgcgtcttgattggctttaacacaggtaactaccaagcgatcgacttatcacagtggattgcaggtaatcccgcggatgttcttgccacgaacttctccaaacccaccagcctctttgaaaagttcccaaaacaggacgtgtttattgctcctggcaag

SEQ ID NO: 748 - protein, 359 aa, synthetic construct
  REGION 1..359: note = Variant of oxalate decarboxylase from Gemmata sp. SH-PL17
MGDPTFMNNVPDPLLSGKDLPTFKFELEKSKGKVIGGSSGKEATVVQLPISKGIAGVSMVLEPGAMRELHWHATAAEWGFVLTGHVRTTVIDPQGAAETNDFGPGDVWYFPRGHGHMLECLGDKPAHFILIFDNGYFSEFGTFSITDWIGHTPKALLAKNFKLPESAFDGFPKKEVYFARGAVPPATPAAPLQGLKLPPLTHKYELLEQEPHKVFKGGREWRVDSSRFPISKTVTGVVLDLEPGALRELHWHPNADEWQYVIDGNISVTMFGSHGRYRTEQMEKGDVGYIPQGYGHSIENVGDRPCRVLIGFNTGNYQAIDLSQWIAGNPADVLATNFSKPTSLFEKFPKQDVFIAPGK

SEQ ID NO: 749 - DNA, 1077 bp, synthetic construct
  misc_feature 1..1077: note = Variant of oxalate decarboxylase from Gemmata sp. SH-PL17
  source 1..1077: mol_type = other DNA
atgggtgaccctacctttatgaacaatgtaccagaccctctgctgtcgggcaaagatttgccgacgttcaagtttgagctggaaaagagcaagggcaaagtcattggggggagttcgggaaaagaagcaaccgttgtccagttacctatctccaaaggcattgctggtgtgagcatggtacttgaaccgggtgcgatgcgcgaattgcactggcatgccacagcagcagagtgggggttcgtattaaccggccacgtccgtacgacggtgatcgatccacaaggtgcggccgaaaccaacgactttggaccgggcgacgtgtggtattttcctcgcggtcatgggcacatgctggaatgcctgggcgataaaccggcgcatttcattctgatcttcgataacggctacttctcagagtttggcaccttctctattactgactggatcggtcacacaccgaaagcgcttctcgccaagaactttaagctgcccgaatcggcttttgatgggtttcccaaaaaagaggtctattttgcacgtggcgcggttccaccagccacccctgcagcgcctttacagggactgaagctgccaccactcacgcataaatacgaactcctcgaacaagaacctcataaagtttttaaaggtggtcgtgaatggcgcgtggatagcactcgttttcccatttccaagactgtaaccggcgttgttcttgatttggaacccggcgcgttacgcgagcttcactggcatcctaatgctgacgagtggcaatatgtgatcgatggcaacattagtgtgacgatgttcggttctcatggccgttaccgcaccgaacagatggagaagggtgatgtcgggtatattccacaggggtatggccacagcatcgaaaatgttggagatcgtccttgtcgcgtcttgattggctttaacacaggtaactaccaagcgatcgacttatcacagtggattgcaggtaatcccgcggatgttcttgccacgaacttctccaaacccaccagcctctttgaaaagttcccaaaacaggacgtgtttattgctcctggcaag

SEQ ID NO: 750 - protein, 359 aa, synthetic construct
  REGION 1..359: note = Variant of oxalate decarboxylase from Gemmata sp. SH-PL17
MGDPTFMNNVPDPLLSGKDLPTFKFELEKSKGKVIGGSSGKEATVVQLPISKGIAGVSMVLEPGAMRELHWHATAAEWGFVLTGHVRTTVIDPQGAAETNDFGPGDVWYFPRGHGHMLECLGDKPAHFILIFDNGYFSEFGTFSITDWIGHTPKALLAKNFKLPESAFDGFPKKEVYFARGAVPPATPAAPLQGLKLPPLTHKYELLEQEPHKVFKGGREWRVDSTRFPISKTVTGVVLDLEPGALRELHWHPNADEWQYVIDGNISVTMFGSHGRYRTEQMEKGDVGYIPQGYGHSIENVGDRPCRVLIGFNTGNYQAIDLSQWIAGNPADVLATNFSKPTSLFEKFPKQDVFIAPGK

SEQ ID NO: 751 - DNA, 1077 bp, synthetic construct
  misc_feature 1..1077: note = Variant of oxalate decarboxylase from Gemmata sp. SH-PL17
  source 1..1077: mol_type = other DNA
atgggtgaccctacctttatgaacaatgtaccagaccctctgctgtcgggcaaagatttgccgacgttcaagtttgaactggaaaagagcaagggcaaagtcattggggggagttcgggaaaagaagcaaccgttgtccagttacctatctccaaaggcattgctggtgtgagcatgactcttgaaccgggtgcgatgcgcgaattgcactggcatgccacagcagcagagtgggggttcgtattaaccggccacgtccgtacgacggtgatcgatccaactggtgcggccgaaaccaacgactttggaccgggcgacgtgtggtattttcctcgcggtcatgggcacatgctggaatgcctgggcgataaaccggcgcatttcattctgatcttcgataacggctacttctcagagtttggcaccttctctattactgactggatcggtcacacaccgaaagcgcttctcgccaagaactttaagctgcccgaatcggcttttgatgggtttcccaaaaaagaggtctattttgcacgtggcgcggttccaccagccacccctgcagcgcctttacagggactgaagctgccaccactcacgcataaatacgaactcctcgaacaagaacctcataaagtttttaaaggtggtcgtgaatggcgcgtggatagcagtcgttttcccatttccaagactgtaaccggcgttgttcttgatttggaacccggcgcgttacgcgagcttcactggcatcctaatgctgacgagtggcaatatgtgatcgatggcaacattagtgtgacgatgttcggttctcatggccgttaccgcaccgaacagatggagaagggtgatgtcgggtatattccacaggggtatggccacagcatcgaaaatgttggagatcgtccttgtcgcgtcttgattggctttaacacaggtaactacgaagcgatcgacttatcacagtggattgcaggtaatcccgcggatgttcttgccacgaacttctccaaacccaccagcctctttgaaaagttcccaaaacaggacgtgtttattgctcctggcaag

SEQ ID NO: 752 - protein, 359 aa, synthetic construct
  REGION 1..359: note = Variant of oxalate decarboxylase from Gemmata sp. SH-PL17
MGDPTFMNNVPDPLLSGKDLPTFKFELEKSKGKVIGGSSGKEATVVQLPISKGIAGVSMTLEPGAMRELHWHATAAEWGFVLTGHVRTTVIDPTGAAETNDFGPGDVWYFPRGHGHMLECLGDKPAHFILIFDNGYFSEFGTFSITDWIGHTPKALLAKNFKLPESAFDGFPKKEVYFARGAVPPATPAAPLQGLKLPPLTHKYELLEQEPHKVFKGGREWRVDSSRFPISKTVTGVVLDLEPGALRELHWHPNADEWQYVIDGNISVTMFGSHGRYRTEQMEKGDVGYIPQGYGHSIENVGDRPCRVLIGFNTGNYEAIDLSQWIAGNPADVLATNFSKPTSLFEKFPKQDVFIAPGK

SEQ ID NO: 753 - DNA, 1077 bp, synthetic construct
  misc_feature 1..1077: note = Variant of oxalate decarboxylase from Gemmata sp. SH-PL17
  source 1..1077: mol_type = other DNA
atgggtgaccctacctttatgaacaatgtaccagaccctctgctgtcgggcaaagatttgccgacgttcaagtttgagctggaaaagagcaagggcaaagtcattggggggagttcgggaaaagaagcaaccgttgtccagttacctatctccaaaggcattgctggtgtgagcatgactcttgaaccgggtgcgatgcgcgaattgcactggcatgccacagcagcagagtgggggttcgtattaaccggccacgtccgtacgacggtgatcgatccaactggtgcggccgaaaccaacgactttggaccgggcgacgtgtggtattttcctcgcggtcatgggcacatgctggaatgcctgggcgataaaccggcgcatttcattctgatcttcgataacggctacttctcagagtttggcaccttctctattactgactggatcggtcacacaccgaaagcgcttctcgccaagaactttaagctgcccgaatcggcttttgatgggtttcccaaaaaagaggtctattttgcacgtggcgcggttccaccagccacccctgcagcgcctttacagggactgaagctgccaccactcacgcataaatacgaactcctcgaacaagaacctcacaaagtttttaaaggtggtcgtgaatggcgcgtggatagctcgcgttttcccatttccaagactgtaaccggcgttgttcttgatttggaacccggcgcgttacgcgagcttcactggcatcctaatgctgacgagtggcaatatgtgatcgatggcaacattagtgtgacgatgttcggttctcatggccgttaccgcaccgaacagatggagaagggtgatgtcgggtatattccacaggggtatggccacagcatcgaaaatgttggagatcgtccttgtcgcgtcttgattggctttaacacaggtaactaccaagcgatcgacttatcacagtggattgcaggtaatcccgcggatgttcttgccacgaacttctccaaacccaccagcctctttgaaaagttcccaaaacaggacgtgtttattgctcctggcaag

SEQ ID NO: 754 - protein, 359 aa, synthetic construct
  REGION 1..359: note = Variant of oxalate decarboxylase from Gemmata sp. SH-PL17
MGDPTFMNNVPDPLLSGKDLPTFKFELEKSKGKVIGGSSGKEATVVQLPISKGIAGVSMTLEPGAMRELHWHATAAEWGFVLTGHVRTTVIDPTGAAETNDFGPGDVWYFPRGHGHMLECLGDKPAHFILIFDNGYFSEFGTFSITDWIGHTPKALLAKNFKLPESAFDGFPKKEVYFARGAVPPATPAAPLQGLKLPPLTHKYELLEQEPHKVFKGGREWRVDSSRFPISKTVTGVVLDLEPGALRELHWHPNADEWQYVIDGNISVTMFGSHGRYRTEQMEKGDVGYIPQGYGHSIENVGDRPCRVLIGFNTGNYQAIDLSQWIAGNPADVLATNFSKPTSLFEKFPKQDVFIAPGK

SEQ ID NO: 755 - DNA, 1077 bp, synthetic construct
  misc_feature 1..1077: note = Variant of oxalate decarboxylase from Gemmata sp. SH-PL17
  source 1..1077: mol_type = other DNA
atgggtgaccctacctttatgaacaatgtaccagaccctctgctgtcgggcaaagatttgccgacgttcaagtttgaactggaaaagagcaagggcaaagtcattggggggagttcgggaaaagaagcaaccgttgtccagttacctatctccaaaggcattgctggtgtgagcatggtacttgaaccgggtgcgatgcgcgaattgcactggcatgccacagcagcagagtgggggttcgtattaaccggccacgtccgtacgacggtgatcgatccacagggtgcggccgaaaccaacgactttggaccgggcgacgtgtggtattttcctcgcggtcatgggcacatgctggaatgcctgggcgataaaccggcgcatttcattctgatcttcgataacggctacttctcagagtttggcaccttctctattactgactggatcggtcacacaccgaaagcgcttctcgccaagaactttggcctgcccgaatcggcttttgatgggtttcccaaaaaagaggtctattttgcacgtggcgcggttccaccagccacccctgcagcgcctttacagggactgaagctgccaccactcacgcataaatacgaactcctcgaacaagaacctcacaaagtttttaaaggtggtcgtgaatggcgcgtggatagcactcgttttcccatttccaagactgtaaccggcgttgttcttgatttggaacccggcgcgttacgcgagcttcactggcatcctaatgctgacgagtggcaatatgtgatcgatggcaacattagtgtgacgatgttcggttctcatggccgttaccgcaccgaacagatggagaagggtgatgtcgggtatattccacaggggtatggccacagcatcgaaaatgttggagatcgtccttgtcgcgtcttgattggctttaacacaggtaactaccaagcgatcgacttatcacagtggattgcaggtaatcccgcggatgttcttgccacgaacttctccaaacccaccagcctctttgaaaagttcccaaaacaggacgtgtttattgctcctggcaag

SEQ ID NO: 756 - protein, 359 aa, synthetic construct
  REGION 1..359: note = Variant of oxalate decarboxylase from Gemmata sp. SH-PL17
MGDPTFMNNVPDPLLSGKDLPTFKFELEKSKGKVIGGSSGKEATVVQLPISKGIAGVSMVLEPGAMRELHWHATAAEWGFVLTGHVRTTVIDPQGAAETNDFGPGDVWYFPRGHGHMLECLGDKPAHFILIFDNGYFSEFGTFSITDWIGHTPKALLAKNFGLPESAFDGFPKKEVYFARGAVPPATPAAPLQGLKLPPLTHKYELLEQEPHKVFKGGREWRVDSTRFPISKTVTGVVLDLEPGALRELHWHPNADEWQYVIDGNISVTMFGSHGRYRTEQMEKGDVGYIPQGYGHSIENVGDRPCRVLIGFNTGNYQAIDLSQWIAGNPADVLATNFSKPTSLFEKFPKQDVFIAPGK

SEQ ID NO: 757 - DNA, 1077 bp, synthetic construct
  misc_feature 1..1077: note = Variant of oxalate decarboxylase from Gemmata sp. SH-PL17
  source 1..1077: mol_type = other DNA
atgggtgaccctacctttatgaacaatgtaccagaccctctgctgtcgggcaaagatttgccgacgttcaagtttgagctggaaaagagcaagggcaaagtcattggggggagttcgggaaaagaagcaaccgttgtccagttacctatctccaaaggcattgctggtgtgagcatggtacttgaaccgggtgcgatgcgcgaattgcactggcatgccacagcagcagagtgggggttcgtattaaccggccacgtccgtacgacggtgatcgatccaactggtgcggccgaaaccaacgactttggaccgggcgacgtgtggtattttcctcgcggtcatgggcacatgctggaatgcctgggcgataaaccggcgcatttcattctgatcttcgataacggctacttctcagagtttggcaccttctctattactgactggatcggtcacacaccgaaagcgcttctcgccaagaactttggtctgcccgaatcggcttttgatgggtttcccaaaaaagaggtctattttgcacgtggcgcggttccaccagccacccctgcagcgcctttacagggactgaagctgccaccactcacgcataaatacgaactcctcgaacaagaaccttcgaaagtttttaaaggtggtcgtgaatggcgcgtggatagcagtcgttttcccatttccaagactgtaaccggcgttgttcttgatttggaacccggcgcgttacgcgagcttcactggcatcctaatgctgacgagtggcaatatgtgatcgatggcaacattagtgtgacgatgttcggttctcatggccgttaccgcaccgaacagatggagaagggtgatgtcgggtatattccacaggggtatggccacagcatcgaaaatgttggagatcgtccttgtcgcgtcttgattggctttaacacaggtaactaccaagcgatcgacttatcacagtggattgcaggtaatcccgcggatgttcttgccacgaacttctccaaacccaccagcctctttgaaaagttcccaaaacaggacgtgtttattgctcctggcaag

SEQ ID NO: 758 - protein, 359 aa, synthetic construct
  REGION 1..359: note = Variant of oxalate decarboxylase from Gemmata sp. SH-PL17
MGDPTFMNNVPDPLLSGKDLPTFKFELEKSKGKVIGGSSGKEATVVQLPISKGIAGVSMVLEPGAMRELHWHATAAEWGFVLTGHVRTTVIDPTGAAETNDFGPGDVWYFPRGHGHMLECLGDKPAHFILIFDNGYFSEFGTFSITDWIGHTPKALLAKNFGLPESAFDGFPKKEVYFARGAVPPATPAAPLQGLKLPPLTHKYELLEQEPSKVFKGGREWRVDSSRFPISKTVTGVVLDLEPGALRELHWHPNADEWQYVIDGNISVTMFGSHGRYRTEQMEKGDVGYIPQGYGHSIENVGDRPCRVLIGFNTGNYQAIDLSQWIAGNPADVLATNFSKPTSLFEKFPKQDVFIAPGK

SEQ ID NO: 759 - DNA, 1077 bp, synthetic construct
  misc_feature 1..1077: note = Variant of oxalate decarboxylase from Gemmata sp. SH-PL17
  source 1..1077: mol_type = other DNA
atgggtgaccctacctttatgaacaatgtaccagaccctctgctgtcgggcaaagatttgccgacgttcaagtttgaactggaaaagagcaagggcaaagtcattggggggagttcgggaaaagaagcaaccgttgtccagttacctatctccaaaggcattgctggtgtgagcatggtacttgaaccgggtgcgatgcgcgaattgcactggcatgccacagcagcagagtgggggttcgtattaaccggccacgtccgtacgacggtgatcgatccacaaggtgcggccgaaaccaacgactttggaccgggcgacgtgtggtattttcctcgcggtcatgggcacatgctggaatgcctgggcgataaaccggcgcatttcattctgatcttcgataacggctacttctcagagtttggcaccttctctattactgactggatcggtcacacaccgaaagcgcttctcgccaagaactttaagctgcccgaatcggcttttgatgggtttcccaaaaaagaggtctattttgcacgtggcgcggttccaccagccacccctgcagcgcctttacagggactgaagctgccaccactcacgcataaatacgaactcctcgaacaagaaccttcgaaagtttttaaaggtggtcgtgaatggcgcgtggatagcagtcgttttcccatttccaagactgtaaccggcgttgttcttgatttggaacccggcgcgttacgcgagcttcactggcatcctaatgctgacgagtggcaatatgtgatcgatggcaacattagtgtgacgatgttcggttctcatggccgttaccgcaccgaacagatggagaagggtgatgtcgggtatattccacaggggtatggccacagcatcgaaaatgttggagatcgtccttgtcgcgtcttgattggctttaacacaggtaactaccaagcgatcgacttatcacagtggattgcaggtaatcccgcggatgttcttgccacgaacttctccaaacccaccagcctctttgaaaagttcccaaaacaggacgtgtttattgctcctggcaag

SEQ ID NO: 760 - protein, 359 aa, synthetic construct
  REGION 1..359: note = Variant of oxalate decarboxylase from Gemmata sp. SH-PL17
MGDPTFMNNVPDPLLSGKDLPTFKFELEKSKGKVIGGSSGKEATVVQLPISKGIAGVSMVLEPGAMRELHWHATAAEWGFVLTGHVRTTVIDPQGAAETNDFGPGDVWYFPRGHGHMLECLGDKPAHFILIFDNGYFSEFGTFSITDWIGHTPKALLAKNFKLPESAFDGFPKKEVYFARGAVPPATPAAPLQGLKLPPLTHKYELLEQEPSKVFKGGREWRVDSSRFPISKTVTGVVLDLEPGALRELHWHPNADEWQYVIDGNISVTMFGSHGRYRTEQMEKGDVGYIPQGYGHSIENVGDRPCRVLIGFNTGNYQAIDLSQWIAGNPADVLATNFSKPTSLFEKFPKQDVFIAPGK

SEQ ID NO: 761 - DNA, 1077 bp, synthetic construct
  misc_feature 1..1077: note = Variant of oxalate decarboxylase from Gemmata sp. SH-PL17
  source 1..1077: mol_type = other DNA
atgggtgaccctacctttatgaacaatgtaccagaccctctgctgtcgggcaaagatttgccgacgttcaagtttgagctggaaaagagcaagggcaaagtcattggggggagttcgggaaaagaagcaaccgttgtccagttacctatctccaaaggcattgctggtgtgagcatgacccttgaaccgggtgcgatgcgcgaattgcactggcatgccacagcagcagagtgggggttcgtattaaccggccacgtccgtacgacggtgatcgatccacaaggtgcggccgaaaccaacgactttggaccgggcgacgtgtggtattttcctcgcggtcatgggcacatgctggaatgcctgggcgataaaccggcgcatttcattctgatcttcgataacggctacttctcagagtttggcaccttctctattactgactggatcggtcacacaccgaaagcgcttctcgccaagaactttaagctgcccgaatcggcttttgatgggtttcccaaaaaagaggtctattttgcacgtggcgcggttccaccagccacccctgcagcgcctttacagggactgaagctgccaccactcacgcataaatacgaactcctcgaacaagaacctcacaaagtttttaaaggtggtcgtgaatggcgcgtggatagctcgcgttttcccatttccaagactgtaaccggcgttgttcttgatttggaacccggcgcgttacgcgagcttcactggcatcctaatgctgacgagtggcaatatgtgatcgatggcaacattagtgtgacgatgttcggttctcatggccgttaccgcaccgaacagatggagaagggtgatgtcgggtatattccacaggggtatggccacagcatcgaaaatgttggagatcgtccttgtcgcgtcttgattggctttaacacaggtaactaccaagcgatcgacttatcacagtggattgcaggtaatcccgcggatgttcttgccacgaacttctccaaacccaccagcctctttgaaaagttcccaaaacaggacgtgtttattgctcctggcaag

SEQ ID NO: 762 - protein, 359 aa, synthetic construct
  REGION 1..359: note = Variant of oxalate decarboxylase from Gemmata sp. SH-PL17
MGDPTFMNNVPDPLLSGKDLPTFKFELEKSKGKVIGGSSGKEATVVQLPISKGIAGVSMTLEPGAMRELHWHATAAEWGFVLTGHVRTTVIDPQGAAETNDFGPGDVWYFPRGHGHMLECLGDKPAHFILIFDNGYFSEFGTFSITDWIGHTPKALLAKNFKLPESAFDGFPKKEVYFARGAVPPATPAAPLQGLKLPPLTHKYELLEQEPHKVFKGGREWRVDSSRFPISKTVTGVVLDLEPGALRELHWHPNADEWQYVIDGNISVTMFGSHGRYRTEQMEKGDVGYIPQGYGHSIENVGDRPCRVLIGFNTGNYQAIDLSQWIAGNPADVLATNFSKPTSLFEKFPKQDVFIAPGK

SEQ ID NO: 763 - DNA, 1077 bp, synthetic construct
  misc_feature 1..1077: note = Variant of oxalate decarboxylase from Gemmata sp. SH-PL17
  source 1..1077: mol_type = other DNA
atgggtgaccctacctttatgaacaatgtaccagaccctctgctgtcgggcaaagatttgccgacgttcaagtttgagctggaaaagagcaagggcaaagtcattggggggagttcgggaaaagaagcaaccgttgtccagttacctatctccaaaggcattgctggtgtgagcatgacccttgaaccgggtgcgatgcgcgaattgcactggcatgccacagcagcagagtgggggttcgtattaaccggccacgtccgtacgacggtgatcgatccaactggtgcggccgaaaccaacgactttggaccgggcgacgtgtggtattttcctcgcggtcatgggcacatgctggaatgcctgggcgataaaccggcgcatttcattctgatcttcgataacggctacttctcagagtttggcaccttctctattactgactggatcggtcacacaccgaaagcgcttctcgccaagaactttggcctgcccgaatcggcttttgatgggtttcccaaaaaagaggtctattttgcacgtggcgcggttccaccagccacccctgcagcgcctttacagggactgaagctgccaccactcacgcataaatacgaactcctcgaacaagaaccttcgaaagtttttaaaggtggtcgtgaatggcgcgtggatagctcgcgttttcccatttccaagactgtaaccggcgttgttcttgatttggaacccggcgcgttacgcgagcttcactggcatcctaatgctgacgagtggcaatatgtgatcgatggcaacattagtgtgacgatgttcggttctcatggccgttaccgcaccgaacagatggagaagggtgatgtcgggtatattccacaggggtatggccacagcatcgaaaatgttggagatcgtccttgtcgcgtcttgattggctttaacacaggtaactacgaagcgatcgacttatcacagtggattgcaggtaatcccgcggatgttcttgccacgaacttctccaaacccaccagcctctttgaaaagttcccaaaacaggacgtgtttattgctcctggcaag

SEQ ID NO: 764 - protein, 359 aa, synthetic construct
  REGION 1..359: note = Variant of oxalate decarboxylase from Gemmata sp. SH-PL17
MGDPTFMNNVPDPLLSGKDLPTFKFELEKSKGKVIGGSSGKEATVVQLPISKGIAGVSMTLEPGAMRELHWHATAAEWGFVLTGHVRTTVIDPTGAAETNDFGPGDVWYFPRGHGHMLECLGDKPAHFILIFDNGYFSEFGTFSITDWIGHTPKALLAKNFGLPESAFDGFPKKEVYFARGAVPPATPAAPLQGLKLPPLTHKYELLEQEPSKVFKGGREWRVDSSRFPISKTVTGVVLDLEPGALRELHWHPNADEWQYVIDGNISVTMFGSHGRYRTEQMEKGDVGYIPQGYGHSIENVGDRPCRVLIGFNTGNYEAIDLSQWIAGNPADVLATNFSKPTSLFEKFPKQDVFIAPGK

SEQ ID NO: 765 - DNA, 1077 bp, synthetic construct
  misc_feature 1..1077: note = Variant of oxalate decarboxylase from Gemmata sp. SH-PL17
  source 1..1077: mol_type = other DNA
atgggtgaccctacctttatgaacaatgtaccagaccctctgctgtcgggcaaagatttgccgacgttcaagtttgagctggaaaagagcaagggcaaagtcattggggggagttcgggaaaagaagcaaccgttgtccagttacctatctccaaaggcattgctggtgtgagcatggtacttgaaccgggtgcgatgcgcgaattgcactggcatgccacagcagcagagtgggggttcgtattaaccggccacgtccgtacgacggtgatcgatccacaaggtgcggccgaaaccaacgactttggaccgggcgacgtgtggtattttcctcgcggtcatgggcacatgctggaatgcctgggcgataaaccggcgcatttcattctgatcttcgataacggctacttctcagagtttggcaccttctctattactgactggatcggtcacacaccgaaagcgcttctcgccaagaactttggcctgcccgaatcggcttttgatgggtttcccaaaaaagaggtctattttgcacgtggcgcggttccaccagccacccctgcagcgcctttacagggactgaagctgccaccactcacgcataaatacgaactcctcgaacaagaacctcacaaagtttttaaaggtggtcgtgaatggcgcgtggatagctcgcgttttcccatttccaagactgtaaccggcgttgttcttgatttggaacccggcgcgttacgcgagcttcactggcatcctaatgctgacgagtggcaatatgtgatcgatggcaacattagtgtgacgatgttcggttctcatggccgttaccgcaccgaacagatggagaagggtgatgtcgggtatattccacaggggtatggccacagcatcgaaaatgttggagatcgtccttgtcgcgtcttgattggctttaacacaggtaactaccaagcgatcgacttatcacagtggattgcaggtaatcccgcggatgttcttgccacgaacttctccaaacccaccagcctctttgaaaagttcccaaaacaggacgtgtttattgctcctggcaag

SEQ ID NO: 766 - protein, 359 aa, synthetic construct
  REGION 1..359: note = Variant of oxalate decarboxylase from Gemmata sp. SH-PL17
MGDPTFMNNVPDPLLSGKDLPTFKFELEKSKGKVIGGSSGKEATVVQLPISKGIAGVSMVLEPGAMRELHWHATAAEWGFVLTGHVRTTVIDPQGAAETNDFGPGDVWYFPRGHGHMLECLGDKPAHFILIFDNGYFSEFGTFSITDWIGHTPKALLAKNFGLPESAFDGFPKKEVYFARGAVPPATPAAPLQGLKLPPLTHKYELLEQEPHKVFKGGREWRVDSSRFPISKTVTGVVLDLEPGALRELHWHPNADEWQYVIDGNISVTMFGSHGRYRTEQMEKGDVGYIPQGYGHSIENVGDRPCRVLIGFNTGNYQAIDLSQWIAGNPADVLATNFSKPTSLFEKFPKQDVFIAPGK

SEQ ID NO: 767 - DNA, 1077 bp, synthetic construct
  misc_feature 1..1077: note = Variant of oxalate decarboxylase from Gemmata sp. SH-PL17
  source 1..1077: mol_type = other DNA
atgggtgaccctacctttatgaacaatgtaccagaccctctgctgtcgggcaaagatttgccgacgttcaagtttgcgctggaaaagagcaagggcaaagtcattggggggagttcgggaaaagaagcaaccgttgtccagttacctatctccaaaggcattgctggtgtgagcatgacccttgaaccgggtgcgatgcgcgaattgcactggcatgccacagcagcagagtgggggttcgtattaaccggccacgtccgtacgacggtgatcgatccacaaggtgcggccgaaaccaacgactttggaccgggcgacgtgtggtattttcctcgcggtcatgggcacatgctggaatgcctgggcgataaaccggcgcatttcattctgatcttcgataacggctacttctcagagtttggcaccttctctattactgactggatcggtcacacaccgaaagcgcttctcgccaagaactttaagctgcccgaatcggcttttgatgggtttcccaaaaaagaggtctattttgcacgtggcgcggttccaccagccacccctgcagcgcctttacagggactgaagctgccaccactcacgcataaatacgaactcctcgaacaagaacctcataaagtttttaaaggtggtcgtgaatggcgcgtggatagcagtcgttttcccatttccaagactgtaaccggcgttgttcttgatttggaacccggcgcgttacgcgagcttcactggcatcctaatgctgacgagtggcaatatgtgatcgatggcaacattagtgtgacgatgttcggttctcatggccgttaccgcaccgaacagatggagaagggtgatgtcgggtatattccacaggggtatggccacagcatcgaaaatgttggagatcgtccttgtcgcgtcttgattggctttaacacaggtaactaccaagcgatcgacttatcacagtggattgcaggtaatcccgcggatgttcttgccacgaacttctccaaacccaccagcctctttgaaaagttcccaaaacaggacgtgtttattgctcctggcaag

SEQ ID NO: 768 - protein, 359 aa, synthetic construct
  REGION 1..359: note = Variant of oxalate decarboxylase from Gemmata sp. SH-PL17
MGDPTFMNNVPDPLLSGKDLPTFKFALEKSKGKVIGGSSGKEATVVQLPISKGIAGVSMTLEPGAMRELHWHATAAEWGFVLTGHVRTTVIDPQGAAETNDFGPGDVWYFPRGHGHMLECLGDKPAHFILIFDNGYFSEFGTFSITDWIGHTPKALLAKNFKLPESAFDGFPKKEVYFARGAVPPATPAAPLQGLKLPPLTHKYELLEQEPHKVFKGGREWRVDSSRFPISKTVTGVVLDLEPGALRELHWHPNADEWQYVIDGNISVTMFGSHGRYRTEQMEKGDVGYIPQGYGHSIENVGDRPCRVLIGFNTGNYQAIDLSQWIAGNPADVLATNFSKPTSLFEKFPKQDVFIAPGK

SEQ ID NO: 769 - DNA, 1077 bp, synthetic construct
  misc_feature 1..1077: note = Variant of oxalate decarboxylase from Gemmata sp. SH-PL17
  source 1..1077: mol_type = other DNA
atgggtgaccctacctttatgaacaatgtaccagaccctctgctgtcgggcaaagatttgccgacgttcaagtttgaactggaaaagagcaagggcaaagtcattggggggagttcgggaaaagaagcaaccgttgtccagttacctatctccaaaggcattgctggtgtgagcatgacccttgaaccgggtgcgatgcgcgaattgcactggcatgccacagcagcagagtgggggttcgtattaaccggccacgtccgtacgacggtgatcgatccacaaggtgcggccgaaaccaacgactttggaccgggcgacgtgtggtattttcctcgcggtcatgggcacatgctggaatgcctgggcgataaaccggcgcatttcattctgatcttcgataacggctacttctcagagtttggcaccttctctattactgactggatcggtcacacaccgaaagcgcttctcgccaagaactttggtctgcccgaatcggcttttgatgggtttcccaaaaaagaggtctattttgcacgtggcgcggttccaccagccacccctgcagcgcctttacagggactgaagctgccaccactcacgcataaatacgaactcctcgaacaagaacctcacaaagtttttaaaggtggtcgtgaatggcgcgtggatagctcgcgttttcccatttccaagactgtaaccggcgttgttcttgatttggaacccggcgcgttacgcgagcttcactggcatcctaatgctgacgagtggcaatatgtgatcgatggcaacattagtgtgacgatgttcggttctcatggccgttaccgcaccgaacagatggagaagggtgatgtcgggtatattccacaggggtatggccacagcatcgaaaatgttggagatcgtccttgtcgcgtcttgattggctttaacacaggtaactaccaagcgatcgacttatcacagtggattgcaggtaatcccgcggatgttcttgccacgaacttctccaaacccaccagcctctttgaaaagttcccaaaacaggacgtgtttattgctcctggcaag

SEQ ID NO: 770 - protein, 359 aa, synthetic construct
  REGION 1..359: note = Variant of oxalate decarboxylase from Gemmata sp. SH-PL17
MGDPTFMNNVPDPLLSGKDLPTFKFELEKSKGKVIGGSSGKEATVVQLPISKGIAGVSMTLEPGAMRELHWHATAAEWGFVLTGHVRTTVIDPQGAAETNDFGPGDVWYFPRGHGHMLECLGDKPAHFILIFDNGYFSEFGTFSITDWIGHTPKALLAKNFGLPESAFDGFPKKEVYFARGAVPPATPAAPLQGLKLPPLTHKYELLEQEPHKVFKGGREWRVDSSRFPISKTVTGVVLDLEPGALRELHWHPNADEWQYVIDGNISVTMFGSHGRYRTEQMEKGDVGYIPQGYGHSIENVGDRPCRVLIGFNTGNYQAIDLSQWIAGNPADVLATNFSKPTSLFEKFPKQDVFIAPGK

SEQ ID NO: 771 - DNA, 1077 bp, synthetic construct
  misc_feature 1..1077: note = Variant of oxalate decarboxylase from Gemmata sp. SH-PL17
  source 1..1077: mol_type = other DNA
atgggtgaccctacctttatgaacaatgtaccagaccctctgctgtcgggcaaagatttgccgacgttcaagtttgaactggaaaagagcaagggcaaagtcattggggggagttcgggaaaagaagcaaccgttgtccagttacctatctccaaaggcattgctggtgtgagcatgactcttgaaccgggtgcgatgcgcgaattgcactggcatgccacagcagcagagtgggggttcgtattaaccggccacgtccgtacgacggtgatcgatccacaaggtgcggccgaaaccaacgactttggaccgggcgacgtgtggtattttcctcgcggtcatgggcacatgctggaatgcctgggcgataaaccggcgcatttcattctgatcttcgataacggctacttctcagagtttggcaccttctctattactgactggatcggtcacacaccgaaagcgcttctcgccaagaactttggtctgcccgaatcggcttttgatgggtttcccaaaaaagaggtctattttgcacgtggcgcggttccaccagccacccctgcagcgcctttacagggactgaagctgccaccactcacgcataaatacgaactcctcgaacaagaacctcacaaagtttttaaaggtggtcgtgaatggcgcgtggatagctcgcgttttcccatttccaagactgtaaccggcgttgttcttgatttggaacccggcgcgttacgcgagcttcactggcatcctaatgctgacgagtggcaatatgtgatcgatggcaacattagtgtgacgatgttcggttctcatggccgttaccgcaccgaacagatggagaagggtgatgtcgggtatattccacaggggtatggccacagcatcgaaaatgttggagatcgtccttgtcgcgtcttgattggctttaacacaggtaactacgaagcgatcgacttatcacagtggattgcaggtaatcccgcggatgttcttgccacgaacttctccaaacccaccagcctctttgaaaagttcccaaaacaggacgtgtttattgctcctggcaag

SEQ ID NO: 772 - protein, 359 aa, synthetic construct
  REGION 1..359: note = Variant of oxalate decarboxylase from Gemmata sp. SH-PL17
MGDPTFMNNVPDPLLSGKDLPTFKFELEKSKGKVIGGSSGKEATVVQLPISKGIAGVSMTLEPGAMRELHWHATAAEWGFVLTGHVRTTVIDPQGAAETNDFGPGDVWYFPRGHGHMLECLGDKPAHFILIFDNGYFSEFGTFSITDWIGHTPKALLAKNFGLPESAFDGFPKKEVYFARGAVPPATPAAPLQGLKLPPLTHKYELLEQEPHKVFKGGREWRVDSSRFPISKTVTGVVLDLEPGALRELHWHPNADEWQYVIDGNISVTMFGSHGRYRTEQMEKGDVGYIPQGYGHSIENVGDRPCRVLIGFNTGNYEAIDLSQWIAGNPADVLATNFSKPTSLFEKFPKQDVFIAPGK

SEQ ID NO: 773 - DNA, 1077 bp, synthetic construct
  misc_feature 1..1077: note = Variant of oxalate decarboxylase from Gemmata sp. SH-PL17
  source 1..1077: mol_type = other DNA
atgggtgaccctacctttatgaacaatgtaccagaccctctgctgtcgggcaaagatttgccgacgttcaagtttgagctggaaaagagcaagggcaaagtcattggggggagttcgggaaaagaagcaaccgttgtccagttacctatctccaaaggcattgctggtgtgagcatgactcttgaaccgggtgcgatgcgcgaattgcactggcatgccacagcagcagagtgggggttcgtattaaccggccacgtccgtacgacggtgatcgatccacagggtgcggccgaaaccaacgactttggaccgggcgacgtgtggtattttcctcgcggtcatgggcacatgctggaatgcctgggcgataaaccggcgcatttcattctgatcttcgataacggctacttctcagagtttggcaccttctctattactgactggatcggtcacacaccgaaagcgcttctcgccaagaactttaagctgcccgaatcggcttttgatgggtttcccaaaaaagaggtctattttgcacgtggcgcggttccaccagccacccctgcagcgcctttacagggactgaagctgccaccactcacgcataaatacgaactcctcgaacaagaacctcacaaagtttttaaaggtggtcgtgaatggcgcgtggatagcactcgttttcccatttccaagactgtaaccggcgttgttcttgatttggaacccggcgcgttacgcgagcttcactggcatcctaatgctgacgagtggcaatatgtgatcgatggcaacattagtgtgacgatgttcggttctcatggccgttaccgcaccgaacagatggagaagggtgatgtcgggtatattccacaggggtatggccacagcatcgaaaatgttggagatcgtccttgtcgcgtcttgattggctttaacacaggtaactacgaagcgatcgacttatcacagtggattgcaggtaatcccgcggatgttcttgccacgaacttctccaaacccaccagcctctttgaaaagttcccaaaacaggacgtgtttattgctcctggcaag

SEQ ID NO: 774 - protein, 359 aa, synthetic construct
  REGION 1..359: note = Variant of oxalate decarboxylase from Gemmata sp. SH-PL17
MGDPTFMNNVPDPLLSGKDLPTFKFELEKSKGKVIGGSSGKEATVVQLPISKGIAGVSMTLEPGAMRELHWHATAAEWGFVLTGHVRTTVIDPQGAAETNDFGPGDVWYFPRGHGHMLECLGDKPAHFILIFDNGYFSEFGTFSITDWIGHTPKALLAKNFKLPESAFDGFPKKEVYFARGAVPPATPAAPLQGLKLPPLTHKYELLEQEPHKVFKGGREWRVDSTRFPISKTVTGVVLDLEPGALRELHWHPNADEWQYVIDGNISVTMFGSHGRYRTEQMEKGDVGYIPQGYGHSIENVGDRPCRVLIGFNTGNYEAIDLSQWIAGNPADVLATNFSKPTSLFEKFPKQDVFIAPGK

SEQ ID NO: 775 - DNA, 1077 bp, synthetic construct
  misc_feature 1..1077: note = Variant of oxalate decarboxylase from Gemmata sp. SH-PL17
  source 1..1077: mol_type = other DNA
atgggtgaccctacctttatgaacaatgtaccagaccctctgctgtcgggcaaagatttgccgacgttcaagtttgagctggaaaagagcaagggcaaagtcattggggggagttcgggaaaagaagcaaccgttgtccagttacctatctccaaaggcattgctggtgtgagcatgactcttgaaccgggtgcgatgcgcgaattgcactggcatgccacagcagcagagtgggggttcgtattaaccggccacgtccgtacgacggtgatcgatccacaaggtgcggccgaaaccaacgactttggaccgggcgacgtgtggtattttcctcgcggtcatgggcacatgctggaatgcctgggcgataaattcgcgcatttcattctgatcttcgataacggctacttctcagagtttggcaccttctctattactgactggatcggtcacacaccgaaagcgcttctcgccaagaactttggcctgcccgaatcggcttttgatgggtttcccaaaaaagaggtctattttgcacgtggcgcggttccaccagccacccctgcagcgcctttacagggactgaagctgccaccactcacgcataaatacgaactcctcgaacaagaaccttcgaaagtttttaaaggtggtcgtgaatggcgcgtggatagcagtcgttttcccatttccaagactgtaaccggcgttgttcttgatttggaacccggcgcgttacgcgagcttcactggcatcctaatgctgacgagtggcaatatgtgatcgatggcaacattagtgtgacgatgttcggttctcatggccgttaccgcaccgaacagatggagaagggtgatgtcgggtatattccacaggggtatggccacagcatcgaaaatgttggagatcgtccttgtcgcgtcttgattggctttaacacaggtaactaccaagcgatcgacttatcacagtggattgcaggtaatcccgcggatgttcttgccacgaacttctccaaacccaccagcctctttgaaaagttcccaaaacaggacgtgtttattgctcctggcaag

SEQ ID NO: 776 - protein, 359 aa, synthetic construct
  REGION 1..359: note = Variant of oxalate decarboxylase from Gemmata sp. SH-PL17
MGDPTFMNNVPDPLLSGKDLPTFKFELEKSKGKVIGGSSGKEATVVQLPISKGIAGVSMTLEPGAMRELHWHATAAEWGFVLTGHVRTTVIDPQGAAETNDFGPGDVWYFPRGHGHMLECLGDKFAHFILIFDNGYFSEFGTFSITDWIGHTPKALLAKNFGLPESAFDGFPKKEVYFARGAVPPATPAAPLQGLKLPPLTHKYELLEQEPSKVFKGGREWRVDSSRFPISKTVTGVVLDLEPGALRELHWHPNADEWQYVIDGNISVTMFGSHGRYRTEQMEKGDVGYIPQGYGHSIENVGDRPCRVLIGFNTGNYQAIDLSQWIAGNPADVLATNFSKPTSLFEKFPKQDVFIAPGK

SEQ ID NO: 777 - DNA, 1077 bp, synthetic construct
  misc_feature 1..1077: note = Variant of oxalate decarboxylase from Gemmata sp. SH-PL17
  source 1..1077: mol_type = other DNA
atgggtgaccctacctttatgaacaatgtaccagaccctctgctgtcgggcaaagatttgccgacgttcaagtttgagctggaaaagagcaagggcaaagtcattggggggagttcgggaaaagaagcaaccgttgtccagttacctatctccaaaggcattgctggtgtgagcatgacccttgaaccgggtgcgatgcgcgaattgcactggcatgccacagcagcagagtgggggttcgtattaaccggccacgtccgtacgacggtgatcgatccacaaggtgcggccgaaaccaacgactttggaccgggcgacgtgtggtattttcctcgcggtcatgggcacatgctggaatgcctgggcgataaattcgcgcatttcattctgatcttcgataacggctacttctcagagtttggcaccttctctattactgactggatcggtcacacaccgaaagcgcttctcgccaagaactttggcctgcccgaatcggcttttgatgggtttcccaaaaaagaggtctattttgcacgtggcgcggttccaccagccacccctgcagcgcctttacagggactgaagctgccaccactcacgcataaatacgaactcctcgaacaagaacctcataaagtttttaaaggtggtcgtgaatggcgcgtggatagcactcgttttcccatttccaagactgtaaccggcgttgttcttgatttggaacccggcgcgttacgcgagcttcactggcatcctaatgctgacgagtggcaatatgtgatcgatggcaacattagtgtgacgatgttcggttctcatggccgttaccgcaccgaacagatggagaagggtgatgtcgggtatattccacaggggtatggccacagcatcgaaaatgttggagatcgtccttgtcgcgtcttgattggctttaacacaggtaactacgaagcgatcgacttatcacagtggattgcaggtaatcccgcggatgttcttgccacgaacttctccaaacccaccagcctctttgaaaagttcccaaaacaggacgtgtttattgctcctggcaag

SEQ ID NO: 778 - protein, 359 aa, synthetic construct
  REGION 1..359: note = Variant of oxalate decarboxylase from Gemmata sp. SH-PL17
MGDPTFMNNVPDPLLSGKDLPTFKFELEKSKGKVIGGSSGKEATVVQLPISKGIAGVSMTLEPGAMRELHWHATAAEWGFVLTGHVRTTVIDPQGAAETNDFGPGDVWYFPRGHGHMLECLGDKFAHFILIFDNGYFSEFGTFSITDWIGHTPKALLAKNFGLPESAFDGFPKKEVYFARGAVPPATPAAPLQGLKLPPLTHKYELLEQEPHKVFKGGREWRVDSTRFPISKTVTGVVLDLEPGALRELHWHPNADEWQYVIDGNISVTMFGSHGRYRTEQMEKGDVGYIPQGYGHSIENVGDRPCRVLIGFNTGNYEAIDLSQWIAGNPADVLATNFSKPTSLFEKFPKQDVFIAPGK

SEQ ID NO: 779 - DNA, 1077 bp, synthetic construct
  misc_feature 1..1077: note = Variant of oxalate decarboxylase from Gemmata sp. SH-PL17
  source 1..1077: mol_type = other DNA
atgggtgaccctacctttatgaacaatgtaccagaccctctgctgtcgggcaaagatttgccgacgttcaagtttgcgctggaaaagagcaagggcaaagtcattggggggagttcgggaaaagaagcaaccgttgtccagttacctatctccaaaggcattgctggtgtgagcatggtacttgaaccgggtgcgatgcgcgaattgcactggcatgccacagcagcagagtgggggttcgtattaaccggccacgtccgtacgacggtgatcgatccacagggtgcggccgaaaccaacgactttggaccgggcgacgtgtggtattttcctcgcggtcatgggcacatgctggaatgcctgggcgataaaccggcgcatttcattctgatcttcgataacggctacttctcagagtttggcaccttctctattactgactggatcggtcacacaccgaaagcgcttctcgccaagaactttaagctgcccgaatcggcttttgatgggtttcccaaaaaagaggtctattttgcacgtggcgcggttccaccagccacccctgcagcgcctttacagggactgaagctgccaccactcacgcataaatacgaactcctcgaacaagaacctcacaaagtttttaaaggtggtcgtgaatggcgcgtggatagctcgcgttttcccatttccaagactgtaaccggcgttgttcttgatttggaacccggcgcgttacgcgagcttcactggcatcctaatgctgacgagtggcaatatgtgatcgatggcaacattagtgtgacgatgttcggttctcatggccgttaccgcaccgaacagatggagaagggtgatgtcgggtatattccacaggggtatggccacagcatcgaaaatgttggagatcgtccttgtcgcgtcttgattggctttaacacaggtaactaccaagcgatcgacttatcacagtggattgcaggtaatcccgcggatgttcttgccacgaacttctccaaacccaccagcctctttgaaaagttcccaaaacaggacgtgtttattgctcctggcaag

SEQ ID NO: 780 - protein, 359 aa, synthetic construct
  REGION 1..359: note = Variant of oxalate decarboxylase from Gemmata sp. SH-PL17
MGDPTFMNNVPDPLLSGKDLPTFKFALEKSKGKVIGGSSGKEATVVQLPISKGIAGVSMVLEPGAMRELHWHATAAEWGFVLTGHVRTTVIDPQGAAETNDFGPGDVWYFPRGHGHMLECLGDKPAHFILIFDNGYFSEFGTFSITDWIGHTPKALLAKNFKLPESAFDGFPKKEVYFARGAVPPATPAAPLQGLKLPPLTHKYELLEQEPHKVFKGGREWRVDSSRFPISKTVTGVVLDLEPGALRELHWHPNADEWQYVIDGNISVTMFGSHGRYRTEQMEKGDVGYIPQGYGHSIENVGDRPCRVLIGFNTGNYQAIDLSQWIAGNPADVLATNFSKPTSLFEKFPKQDVFIAPGK

SEQ ID NO: 781 - DNA, 1077 bp, synthetic construct
  misc_feature 1..1077: note = Variant of oxalate decarboxylase from Gemmata sp. SH-PL17
  source 1..1077: mol_type = other DNA
atgggtgaccctacctttatgaacaatgtaccagaccctctgctgtcgggcaaagatttgccgacgttcaagtttgagctggaaaagagcaagggcaaagtcattggggggagttcgggaaaagaagcaaccgttgtccagttacctatctccaaaggcattgctggtgtgagcatgactcttgaaccgggtgcgatgcgcgaattgcactggcatgccacagcagcagagtgggggttcgtattaaccggccacgtccgtacgacggtgatcgatccacagggtgcggccgaaaccaacgactttggaccgggcgacgtgtggtattttcctcgcggtcatgggcacatgctggaatgcctgggcgataaattcgcgcatttcattctgatcttcgataacggctacttctcagagtttggcaccttctctattactgactggatcggtcacacaccgaaagcgcttctcgccaagaactttaagctgcccgaatcggcttttgatgggtttcccaaaaaagaggtctattttgcacgtggcgcggttccaccagccacccctgcagcgcctttacagggactgaagctgccaccactcacgcataaatacgaactcctcgaacaagaaccttcgaaagtttttaaaggtggtcgtgaatggcgcgtggatagcactcgttttcccatttccaagactgtaaccggcgttgttcttgatttggaacccggcgcgttacgcgagcttcactggcatcctaatgctgacgagtggcaatatgtgatcgatggcaacattagtgtgacgatgttcggttctcatggccgttaccgcaccgaacagatggagaagggtgatgtcgggtatattccacaggggtatggccacagcatcgaaaatgttggagatcgtccttgtcgcgtcttgattggctttaacacaggtaactaccaagcgatcgacttatcacagtggattgcaggtaatcccgcggatgttcttgccacgaacttctccaaacccaccagcctctttgaaaagttcccaaaacaggacgtgtttattgctcctggcaag

SEQ ID NO: 782 - protein, 359 aa, synthetic construct
  REGION 1..359: note = Variant of oxalate decarboxylase from Gemmata sp. SH-PL17
MGDPTFMNNVPDPLLSGKDLPTFKFELEKSKGKVIGGSSGKEATVVQLPISKGIAGVSMTLEPGAMRELHWHATAAEWGFVLTGHVRTTVIDPQGAAETNDFGPGDVWYFPRGHGHMLECLGDKFAHFILIFDNGYFSEFGTFSITDWIGHTPKALLAKNFKLPESAFDGFPKKEVYFARGAVPPATPAAPLQGLKLPPLTHKYELLEQEPSKVFKGGREWRVDSTRFPISKTVTGVVLDLEPGALRELHWHPNADEWQYVIDGNISVTMFGSHGRYRTEQMEKGDVGYIPQGYGHSIENVGDRPCRVLIGFNTGNYQAIDLSQWIAGNPADVLATNFSKPTSLFEKFPKQDVFIAPGK

SEQ ID NO: 783 - DNA, 1077 bp, synthetic construct
  misc_feature 1..1077: note = Variant of oxalate decarboxylase from Gemmata sp. SH-PL17
  source 1..1077: mol_type = other DNA
atgggtgaccctacctttatgaacaatgtaccagaccctctgctgtcgggcaaagatttgccgacgttcaagtttgaactggaaaagagcaagggcaaagtcattggggggagttcgggaaaagaagcaaccgttgtccagttacctatctccaaaggcattgctggtgtgagcatgacccttgaaccgggtgcgatgcgcgaattgcactggcatgccacagcagcagagtgggggttcgtattaaccggccacgtccgtacgacggtgatcgatccaactggtgcggccgaaaccaacgactttggaccgggcgacgtgtggtattttcctcgcggtcatgggcacatgctggaatgcctgggcgataaattcgcgcatttcattctgatcttcgataacggctacttctcagagtttggcaccttctctattactgactggatcggtcacacaccgaaagcgcttctcgccaagaactttaagctgcccgaatcggcttttgatgggtttcccaaaaaagaggtctattttgcacgtggcgcggttccaccagccacccctgcagcgcctttacagggactgaagctgccaccactcacgcataaatacgaactcctcgaacaagaacctcacaaagtttttaaaggtggtcgtgaatggcgcgtggatagcagtcgttttcccatttccaagactgtaaccggcgttgttcttgatttggaacccggcgcgttacgcgagcttcactggcatcctaatgctgacgagtggcaatatgtgatcgatggcaacattagtgtgacgatgttcggttctcatggccgttaccgcaccgaacagatggagaagggtgatgtcgggtatattccacaggggtatggccacagcatcgaaaatgttggagatcgtccttgtcgcgtcttgattggctttaacacaggtaactacgaagcgatcgacttatcacagtggattgcaggtaatcccgcggatgttcttgccacgaacttctccaaacccaccagcctctttgaaaagttcccaaaacaggacgtgtttattgctcctggcaag

SEQ ID NO: 784 - protein, 359 aa, synthetic construct
  REGION 1..359: note = Variant of oxalate decarboxylase from Gemmata sp. SH-PL17
MGDPTFMNNVPDPLLSGKDLPTFKFELEKSKGKVIGGSSGKEATVVQLPISKGIAGVSMTLEPGAMRELHWHATAAEWGFVLTGHVRTTVIDPTGAAETNDFGPGDVWYFPRGHGHMLECLGDKFAHFILIFDNGYFSEFGTFSITDWIGHTPKALLAKNFKLPESAFDGFPKKEVYFARGAVPPATPAAPLQGLKLPPLTHKYELLEQEPHKVFKGGREWRVDSSRFPISKTVTGVVLDLEPGALRELHWHPNADEWQYVIDGNISVTMFGSHGRYRTEQMEKGDVGYIPQGYGHSIENVGDRPCRVLIGFNTGNYEAIDLSQWIAGNPADVLATNFSKPTSLFEKFPKQDVFIAPGK

SEQ ID NO: 785 - DNA, 1077 bp, synthetic construct
  misc_feature 1..1077: note = Variant of oxalate decarboxylase from Gemmata sp. SH-PL17
  source 1..1077: mol_type = other DNA
atgggtgaccctacctttatgaacaatgtaccagaccctctgctgtcgggcaaagatttgccgacgttcaagtttgagctggaaaagagcaagggcaaagtcattggggggagttcgggaaaagaagcaaccgttgtccagttacctatctccaaaggcattgctggtgtgagcatgactcttgaaccgggtgcgatgcgcgaattgcactggcatgccacagcagcagagtgggggttcgtattaaccggccacgtccgtacgacggtgatcgatccacaaggtgcggccgaaaccaacgactttggaccgggcgacgtgtggtattttcctcgcggtcatgggcacatgctggaatgcctgggcgataaattcgcgcatttcattctgatcttcgataacggctacttctcagagtttggcaccttctctattactgactggatcggtcacacaccgaaagcgcttctcgccaagaactttggtctgcccgaatcggcttttgatgggtttcccaaaaaagaggtctattttgcacgtggcgcggttccaccagccacccctgcagcgcctttacagggactgaagctgccaccactcacgcataaatacgaactcctcgaacaagaacctcacaaagtttttaaaggtggtcgtgaatggcgcgtggatagcactcgttttcccatttccaagactgtaaccggcgttgttcttgatttggaacccggcgcgttacgcgagcttcactggcatcctaatgctgacgagtggcaatatgtgatcgatggcaacattagtgtgacgatgttcggttctcatggccgttaccgcaccgaacagatggagaagggtgatgtcgggtatattccacaggggtatggccacagcatcgaaaatgttggagatcgtccttgtcgcgtcttgattggctttaacacaggtaactaccaagcgatcgacttatcacagtggattgcaggtaatcccgcggatgttcttgccacgaacttctccaaacccaccagcctctttgaaaagttcccaaaacaggacgtgtttattgctcctggcaag

SEQ ID NO: 786 - protein, 359 aa, synthetic construct
  REGION 1..359: note = Variant of oxalate decarboxylase from Gemmata sp. SH-PL17
MGDPTFMNNVPDPLLSGKDLPTFKFELEKSKGKVIGGSSGKEATVVQLPISKGIAGVSMTLEPGAMRELHWHATAAEWGFVLTGHVRTTVIDPQGAAETNDFGPGDVWYFPRGHGHMLECLGDKFAHFILIFDNGYFSEFGTFSITDWIGHTPKALLAKNFGLPESAFDGFPKKEVYFARGAVPPATPAAPLQGLKLPPLTHKYELLEQEPHKVFKGGREWRVDSTRFPISKTVTGVVLDLEPGALRELHWHPNADEWQYVIDGNISVTMFGSHGRYRTEQMEKGDVGYIPQGYGHSIENVGDRPCRVLIGFNTGNYQAIDLSQWIAGNPADVLATNFSKPTSLFEKFPKQDVFIAPGK

SEQ ID NO: 787 - DNA, 1077 bp, synthetic construct
  misc_feature 1..1077: note = Variant of oxalate decarboxylase from Gemmata sp. SH-PL17
  source 1..1077: mol_type = other DNA
atgggtgaccctacctttatgaacaatgtaccagaccctgtgctgtcgggcaaagatttgccgacgttcaagtttgaactggaaaagagcaagggcaaagtcattggggggagttcgggaaaagaagcaaccgttgtccagttacctatctccaaaggcattgctggtgtgagcatgacccttgaaccgggtgcgatgcgcgaattgcactggcatgccacagcagcagagtgggggttcgtattaaccggccacgtccgtacgacggtgatcgatccacaaggtgcggccgaaaccaacgactttggaccgggcgacgtgtggtattttcctcgcggtcatgggcacatgctggaatgcctgggcgataaaccggcgcatttcattctgatcttcgataacggctacttctcagagtttggcaccttctctattactgactggatcggtcacacaccgaaagcgcttctcgccaagaactttggtctgcccgaatcggcttttgatgggtttcccaaaaaagaggtctattttgcacgtggcgcggttccaccagccacccctgcagcgcctttacagggactgaagctgccaccactcacgcataaatacgaactcctcgaacaagaacctcacaaagtttttaaaggtggtcgtgaatggcgcgtggatagctcgcgttttcccatttccaagactgtaaccggcgttgttcttgatttggaacccggcgcgttacgcgagcttcactggcatcctaatgctgacgagtggcaatatgtgatcgatggcaacattagtgtgacgatgttcggttctcatggccgtcggcgcaccgaacagatggagaagggtgatgtcgggtatattccacaggggtatggccacagcatcgaaaatgttggagatcgtccttgtcgcgtcttgattggctttaacacaggtaactaccaagcgatcgacttatcacagtggattgcaggtaatcccgcggatgttcttgccacgaacttctccaaacccaccagcctctttgaaaagttcccaaaacaggacgtgtttattgctcctggcaag

SEQ ID NO: 788 - protein, 359 aa, synthetic construct
  REGION 1..359: note = Variant of oxalate decarboxylase from Gemmata sp. SH-PL17
MGDPTFMNNVPDPVLSGKDLPTFKFELEKSKGKVIGGSSGKEATVVQLPISKGIAGVSMTLEPGAMRELHWHATAAEWGFVLTGHVRTTVIDPQGAAETNDFGPGDVWYFPRGHGHMLECLGDKPAHFILIFDNGYFSEFGTFSITDWIGHTPKALLAKNFGLPESAFDGFPKKEVYFARGAVPPATPAAPLQGLKLPPLTHKYELLEQEPHKVFKGGREWRVDSSRFPISKTVTGVVLDLEPGALRELHWHPNADEWQYVIDGNISVTMFGSHGRRRTEQMEKGDVGYIPQGYGHSIENVGDRPCRVLIGFNTGNYQAIDLSQWIAGNPADVLATNFSKPTSLFEKFPKQDVFIAPGK

SEQ ID NO: 789 - DNA, 1077 bp, synthetic construct
  misc_feature 1..1077: note = Variant of oxalate decarboxylase from Gemmata sp. SH-PL17
  source 1..1077: mol_type = other DNA
atgggtgaccctacctttatgaacaatgtaccagaccctgtgctgtcgggcaaagatttgccgacgttcaagtttgaactggaaaagagcaagggcaaagtcattggggggagttcgggaaaagaagcaaccgttgtccagttacctatctccaaaggcattgctggtgtgagcatgacccttgaaccgggtgcgatgcgcgaattgcactggcatgccacagcagcagagtgggggttcgtattaaccggccacgtccgtacgacggtgatcgatccacaaggtgcggccgaaaccaacgactttggaccgggcgacgtgtggtattttcctcgcggtcatgggcacatgctggaatgcctgggcgataaaccggcgcatttcattctgatcttcgataacggctacttctcagagtttggcaccttctctattactgactggatcggtcacacaccgaaagcgcttctcgccaagaactttggtctgcccgaatcggcttttgatgggtttcccaaaaaagaggtctattttgcacgtggcgcggttccaccagccacccctgcagcgcctttacagggactgaagctgccaccactcacgcataaatacgaactcctcgaacaagaacctcacaaagtttttaaaggtggtcgtgaatggcgcgtggatagctcgcgttttcccatttccaagactgtaaccggcgttgttcttgatttggaacccggcgcgttacgcgagcttcactggcatcctaatgctgacgagtggcaatatgtgatcgatggcaacattagtgtgacgatgttcggttctcatggccgttgtcgcaccgaacagatggagaagggtgatgtcgggtatattccacaggggtatggccacagcatcgaaaatgttggagatcgtccttgtcgcgtcttgattggctttaacacaggtaactaccaagcgatcgacttatcacagtggattgcaggtaatcccgcggatgttcttgccacgaacttctccaaacccaccagcctctttgaaaagttcccaaaacaggacgtgtttattgctcctggcaag

SEQ ID NO: 790 - protein, 359 aa, synthetic construct
  REGION 1..359: note = Variant of oxalate decarboxylase from Gemmata sp. SH-PL17
MGDPTFMNNVPDPVLSGKDLPTFKFELEKSKGKVIGGSSGKEATVVQLPISKGIAGVSMTLEPGAMRELHWHATAAEWGFVLTGHVRTTVIDPQGAAETNDFGPGDVWYFPRGHGHMLECLGDKPAHFILIFDNGYFSEFGTFSITDWIGHTPKALLAKNFGLPESAFDGFPKKEVYFARGAVPPATPAAPLQGLKLPPLTHKYELLEQEPHKVFKGGREWRVDSSRFPISKTVTGVVLDLEPGALRELHWHPNADEWQYVIDGNISVTMFGSHGRCRTEQMEKGDVGYIPQGYGHSIENVGDRPCRVLIGFNTGNYQAIDLSQWIAGNPADVLATNFSKPTSLFEKFPKQDVFIAPGK

SEQ ID NO: 791 - DNA, 1077 bp, synthetic construct
  misc_feature 1..1077: note = Variant of oxalate decarboxylase from Gemmata sp. SH-PL17
  source 1..1077: mol_type = other DNA
atgggtgaccctacctttatgaacaatgtaccagaccctgtgctgtcgggcaaagatttgccgacgttcaagtttgaactggaaaagagcaagggcaaagtcattggggggagttcgggaaaagaagcaaccgttgtccagttacctatctccaaaggcattgctggtgtgagcatgacccttgaaccgggtgcgatgcgcgaattgcactggcatgccacagcagcagagtgggggttcgtattaaccggccacgtccgtacgacggtgatcgatccacaaggtgcggccgaaaccaacgactttggaccgggcgacgtgtggtattttcctcgcggtcatgggcacatgctggaatgcctgggcgataaaccggcgcatttcattctgatcttcgataacggctacttctcagagtttggcaccttctctattactgactggatcggtcacacaccgaaagcgcttctcgccaagaactttggtctgcccgaatcggcttttgatgggtttcccaaaaaagaggtctattttgcacgtggcgcggttccaccagccacccctgcagcgcctttacagggactgaagctgccaccactcacgcataaatacgaactcctcgaacaagaacctcacaaagtttttaaaggtggtcgtgaatggcgcgtggatagctcgcgttttcccatttccaagactgtaaccggcgttgttcttgatttggaacccggcgcgttacgcgagcttcactggcatcctaatgctgacgagtggcaatatgtgatcgatggcaacattagtgtgacgatgttcggttctcatggccgtacgcgcaccgaacagatggagaagggtgatgtcgggtatattccacaggggtatggccacagcatcgaaaatgttggagatcgtccttgtcgcgtcttgattggctttaacacaggtaactaccaagcgatcgacttatcacagtggattgcaggtaatcccgcggatgttcttgccacgaacttctccaaacccaccagcctctttgaaaagttcccaaaacaggacgtgtttattgctcctggcaag

SEQ ID NO: 792 - protein, 359 aa, synthetic construct
  REGION 1..359: note = Variant of oxalate decarboxylase from Gemmata sp. SH-PL17
MGDPTFMNNVPDPVLSGKDLPTFKFELEKSKGKVIGGSSGKEATVVQLPISKGIAGVSMTLEPGAMRELHWHATAAEWGFVLTGHVRTTVIDPQGAAETNDFGPGDVWYFPRGHGHMLECLGDKPAHFILIFDNGYFSEFGTFSITDWIGHTPKALLAKNFGLPESAFDGFPKKEVYFARGAVPPATPAAPLQGLKLPPLTHKYELLEQEPHKVFKGGREWRVDSSRFPISKTVTGVVLDLEPGALRELHWHPNADEWQYVIDGNISVTMFGSHGRTRTEQMEKGDVGYIPQGYGHSIENVGDRPCRVLIGFNTGNYQAIDLSQWIAGNPADVLATNFSKPTSLFEKFPKQDVFIAPGK

SEQ ID NO: 793 - DNA, 1077 bp, synthetic construct
  misc_feature 1..1077: note = Variant of oxalate decarboxylase from Gemmata sp. SH-PL17
  source 1..1077: mol_type = other DNA
atgggtgaccctacctttatgaacaatgtaccagaccctgtgctgtcgggcaaagatttgccgacgttcaagtttgaactggaaaagagcaagggcaaagtcattggggggagttcgggaaaagaagcaaccgttgtccagttacctatctccaaaggcattgctggtgtgagcatgacccttgaaccgggtgcgatgcgcgaattgcactggcatgccacagcagcagagtgggggttcgtattaaccggccacgtccgtacgacggtgatcgatccacaaggtgcggccgaaaccaacgactttggaccgggcgacgtgtggtattttcctcgcggtcatgggcacatgctggaatgcctgggcgataaaccggcgcatttcattctgatcttcgataacggctacttctcagagtttggcaccttctctattactgactggatcggtcacacaccgaaagcgcttctcgccaagaactttggtctgcccgaaagggcttttgatgggtttcccaaaaaagaggtctattttgcacgtggcgcggttccaccagccacccctgcagcgcctttacagggactgaagctgccaccactcacgcataaatacgaactcctcgaacaagaacctcacaaagtttttaaaggtggtcgtgaatggcgcgtggatagctcgcgttttcccatttccaagactgtaaccggcgttgttcttgatttggaacccggcgcgttacgcgagcttcactggcatcctaatgctgacgagtggcaatatgtgatcgatggcaacattagtgtgacgatgttcggttctcatggccgttaccgcaccgaacagatggagaagggtgatgtcgggtatattccacaggggtatggccacagcatcgaaaatgttggagatcgtccttgtcgcgtcttgattggctttaacacaggtaactaccaagcgatcgacttatcacagtggattgcaggtaatcccgcggatgttcttgccacgaacttctccaaacccaccagcctctttgaaaagttcccaaaacaggacgtgtttattgctcctggcaag

SEQ ID NO: 794 - protein, 359 aa, synthetic construct
  REGION 1..359: note = Variant of oxalate decarboxylase from Gemmata sp. SH-PL17
MGDPTFMNNVPDPVLSGKDLPTFKFELEKSKGKVIGGSSGKEATVVQLPISKGIAGVSMTLEPGAMRELHWHATAAEWGFVLTGHVRTTVIDPQGAAETNDFGPGDVWYFPRGHGHMLECLGDKPAHFILIFDNGYFSEFGTFSITDWIGHTPKALLAKNFGLPERAFDGFPKKEVYFARGAVPPATPAAPLQGLKLPPLTHKYELLEQEPHKVFKGGREWRVDSSRFPISKTVTGVVLDLEPGALRELHWHPNADEWQYVIDGNISVTMFGSHGRYRTEQMEKGDVGYIPQGYGHSIENVGDRPCRVLIGFNTGNYQAIDLSQWIAGNPADVLATNFSKPTSLFEKFPKQDVFIAPGK

SEQ ID NO: 795 - DNA, 1077 bp, synthetic construct
  misc_feature 1..1077: note = Variant of oxalate decarboxylase from Gemmata sp. SH-PL17
  source 1..1077: mol_type = other DNA
atgggtgaccctacctttatgaacaatgtaccagaccctgtgctgtcgggcaaagatttgccgacgttcaagtttgaactggaaaagagcaagggcaaagtcattggggggagttcgggaaaagaagcaaccgttgtccagttacctatctccaaaggcattgctggtgtgagcatgacccttgaaccgggtgcgatgcgcgaattgcactggcatgccacagcagcagagtgggggttcgtattaaccggccacgtccgtacgacggtgatcgatccacaaggtgcggccgaaaccaacgactttggaccgggcgacgtgtggtattttcctcgcggtcatgggcacatgctggaatgcctgggcgataaaccggcgcatttcattctgatcttcgataacggctacttctcagagtttggcaccttctctattactgactggatcggtcacacaccgaaagcgcttctcgccaagaactttggtctgcccgaatcggcttttgatgggtttcccaaaaaagaggtctattttgcacgtggcgcggttccaccagccacccctgcagcgcctttacagggactgaagctgccaccactcacgcataaatacgaactcctcgaacaagaacctcacaaagtttttaaaggtggtcgtgaatggcgcgtggatagctcgcgttttcccatttccaagcatgtaaccggcgttgttcttgatttggaacccggcgcgttacgcgagcttcactggcatcctaatgctgacgagtggcaatatgtgatcgatggcaacattagtgtgacgatgttcggttctcatggccgttaccgcaccgaacagatggagaagggtgatgtcgggtatattccacaggggtatggccacagcatcgaaaatgttggagatcgtccttgtcgcgtcttgattggctttaacacaggtaactaccaagcgatcgacttatcacagtggattgcaggtaatcccgcggatgttcttgccacgaacttctccaaacccaccagcctctttgaaaagttcccaaaacaggacgtgtttattgctcctggcaag

SEQ ID NO: 796 - protein, 359 aa, synthetic construct
  REGION 1..359: note = Variant of oxalate decarboxylase from Gemmata sp. SH-PL17
MGDPTFMNNVPDPVLSGKDLPTFKFELEKSKGKVIGGSSGKEATVVQLPISKGIAGVSMTLEPGAMRELHWHATAAEWGFVLTGHVRTTVIDPQGAAETNDFGPGDVWYFPRGHGHMLECLGDKPAHFILIFDNGYFSEFGTFSITDWIGHTPKALLAKNFGLPESAFDGFPKKEVYFARGAVPPATPAAPLQGLKLPPLTHKYELLEQEPHKVFKGGREWRVDSSRFPISKHVTGVVLDLEPGALRELHWHPNADEWQYVIDGNISVTMFGSHGRYRTEQMEKGDVGYIPQGYGHSIENVGDRPCRVLIGFNTGNYQAIDLSQWIAGNPADVLATNFSKPTSLFEKFPKQDVFIAPGK

SEQ ID NO: 797 - DNA, 1077 bp, synthetic construct
  misc_feature 1..1077: note = Variant of oxalate decarboxylase from Gemmata sp. SH-PL17
  source 1..1077: mol_type = other DNA
atgggtgaccctacctttatgaacaatgtaccagaccctgtgctgtcgggcaaagatttgccgacgttcaagtttgaactggaaaagagcaagggcaaagtcattggggggagttcgggaaaagaagcaaccgttgtccagttacctatctccaaaggcattgctggtgtgagcatgacccttgaaccgggtgcgatgcgcgaattgcactggcatgccacagcagcagagtgggggttcgtattaaggggccacgtccgtacgacggtgatcgatccacaaggtgcggccgaaaccaacgactttggaccgggcgacgtgtggtattttcctcgcggtcatgggcacatgctggaatgcctgggcgataaaccggcgcatttcattctgatcttcgataacggctacttctcagagtttggcaccttctctattactgactggatcggtcacacaccgaaagcgcttctcgccaagaactttggtctgcccgaatcggcttttgatgggtttcccaaaaaagaggtctattttgcacgtggcgcggttccaccagccacccctgcagcgcctttacagggactgaagctgccaccactcacgcataaatacgaactcctcgaacaagaacctcacaaagtttttaaaggtggtcgtgaatggcgcgtggatagctcgcgttttcccatttccaagactgtaaccggcgttgttcttgatttggaacccggcgcgttacgcgagcttcactggcatcctaatgctgacgagtggcaatatgtgatcgatggcaacattagtgtgacgatgttcggttctcatggccgttaccgcaccgaacagatggagaagggtgatgtcgggtatattccacaggggtatggccacagcatcgaaaatgttggagatcgtccttgtcgcgtcttgattggctttaacacaggtaactaccaagcgatcgacttatcacagtggattgcaggtaatcccgcggatgttcttgccacgaacttctccaaacccaccagcctctttgaaaagttcccaaaacaggacgtgtttattgctcctggcaag

SEQ ID NO: 798 - protein, 359 aa, synthetic construct
  REGION 1..359: note = Variant of oxalate decarboxylase from Gemmata sp. SH-PL17
MGDPTFMNNVPDPVLSGKDLPTFKFELEKSKGKVIGGSSGKEATVVQLPISKGIAGVSMTLEPGAMRELHWHATAAEWGFVLRGHVRTTVIDPQGAAETNDFGPGDVWYFPRGHGHMLECLGDKPAHFILIFDNGYFSEFGTFSITDWIGHTPKALLAKNFGLPESAFDGFPKKEVYFARGAVPPATPAAPLQGLKLPPLTHKYELLEQEPHKVFKGGREWRVDSSRFPISKTVTGVVLDLEPGALRELHWHPNADEWQYVIDGNISVTMFGSHGRYRTEQMEKGDVGYIPQGYGHSIENVGDRPCRVLIGFNTGNYQAIDLSQWIAGNPADVLATNFSKPTSLFEKFPKQDVFIAPGK

SEQ ID NO: 799 - DNA, 1077 bp, synthetic construct
  misc_feature 1..1077: note = Variant of oxalate decarboxylase from Gemmata sp. SH-PL17
  source 1..1077: mol_type = other DNA
atgggtgaccctacctttatgaacaatgtaccagaccctgtgctgtcgggcaaagatttgccgacgttcaagtttgaactggaaaagagcaagggcaaagtcattggggggagttcgggaaaagaagcaaccgttgtccagttacctatctccaaaggcattgctggtgtgagcatgatgcttgaaccgggtgcgatgcgcgaattgcactggcatgccacagcagcagagtgggggttcgtattaaccggccacgtccgtacgacggtgatcgatccacaaggtgcggccgaaaccaacgactttggaccgggcgacgtgtggtattttcctcgcggtcatgggcacatgctggaatgcctgggcgataaaccggcgcatttcattctgatcttcgataacggctacttctcagagtttggcaccttctctattactgactggatcggtcacacaccgaaagcgcttctcgccaagaactttggtctgcccgaatcggcttttgatgggtttcccaaaaaagaggtctattttgcacgtggcgcggttccaccagccacccctgcagcgcctttacagggactgaagctgccaccactcacgcataaatacgaactcctcgaacaagaacctcacaaagtttttaaaggtggtcgtgaatggcgcgtggatagctcgcgttttcccatttccaagactgtaaccggcgttgttcttgatttggaacccggcgcgttacgcgagcttcactggcatcctaatgctgacgagtggcaatatgtgatcgatggcaacattagtgtgacgatgttcggttctcatggccgttaccgcaccgaacagatggagaagggtgatgtcgggtatattccacaggggtatggccacagcatcgaaaatgttggagatcgtccttgtcgcgtcttgattggctttaacacaggtaactaccaagcgatcgacttatcacagtggattgcaggtaatcccgcggatgttcttgccacgaacttctccaaacccaccagcctctttgaaaagttcccaaaacaggacgtgtttattgctcctggcaag

SEQ ID NO: 800 - protein, 359 aa, synthetic construct
  REGION 1..359: note = Variant of oxalate decarboxylase from Gemmata sp. SH-PL17
MGDPTFMNNVPDPVLSGKDLPTFKFELEKSKGKVIGGSSGKEATVVQLPISKGIAGVSMMLEPGAMRELHWHATAAEWGFVLTGHVRTTVIDPQGAAETNDFGPGDVWYFPRGHGHMLECLGDKPAHFILIFDNGYFSEFGTFSITDWIGHTPKALLAKNFGLPESAFDGFPKKEVYFARGAVPPATPAAPLQGLKLPPLTHKYELLEQEPHKVFKGGREWRVDSSRFPISKTVTGVVLDLEPGALRELHWHPNADEWQYVIDGNISVTMFGSHGRYRTEQMEKGDVGYIPQGYGHSIENVGDRPCRVLIGFNTGNYQAIDLSQWIAGNPADVLATNFSKPTSLFEKFPKQDVFIAPGK

SEQ ID NO: 801 - DNA, 1077 bp, synthetic construct
  misc_feature 1..1077: note = Variant of oxalate decarboxylase from Gemmata sp. SH-PL17
  source 1..1077: mol_type = other DNA
atgggtgaccctacctttatgaacaatgtaccagaccctgtgctgtcgggcaaagatttgccgacgttcaagtttgaactggaaaagagcaagggcaaagtcattggggggagttcgggaaaagaagcaaccgttgtccagttacctatctccaaaggcattgctggtgtgagcatgacccttgaaccgggtgcgatgcgcgaattgcactggcatgccacagcagcagagtgggggttcgtattaaccggccacgtccgtacgacggtgatcgatccacaaggtgcggccgaaaccaacgactttggaccgggcgacgtgtggtattttcctcgcggtcatgggcacatgctggaatgcctgggcgataaaccggcgcatttcattctgatcttcgataacggctacttctcagagtttggcaccttctctattactgactggatcggtcacacaccgaaagcgcttctcgccaagaactttggtctgcccgaatcggcttttgatgggtttcccaaaaaagaggtctattttgcacgtggcgcggttccaccagccacccctgcagcgcctttacagggactgaagctgccaccactcacgcataaatacgaactcctcgaacaagaacctcacaaagtttttaaaggtggtcgtgaatggcgcgtggatagctcgcgttttcccatttccaagactgtaaccggcgttgttcttgatttggaacccggcgcgttacgcgagcttcactggcatcctaatgctgacgagtggcaatatgtgatcgatggcaacattagtgtgacgatgttcggttctcatggccgtattcgcaccgaacagatggagaagggtgatgtcgggtatattccacaggggtatggccacagcatcgaaaatgttggagatcgtccttgtcgcgtcttgattggctttaacacaggtaactaccaagcgatcgacttatcacagtggattgcaggtaatcccgcggatgttcttgccacgaacttctccaaacccaccagcctctttgaaaagttcccaaaacaggacgtgtttattgctcctggcaag

SEQ ID NO: 802 - protein, 359 aa, synthetic construct
  REGION 1..359: note = Variant of oxalate decarboxylase from Gemmata sp. SH-PL17
MGDPTFMNNVPDPVLSGKDLPTFKFELEKSKGKVIGGSSGKEATVVQLPISKGIAGVSMTLEPGAMRELHWHATAAEWGFVLTGHVRTTVIDPQGAAETNDFGPGDVWYFPRGHGHMLECLGDKPAHFILIFDNGYFSEFGTFSITDWIGHTPKALLAKNFGLPESAFDGFPKKEVYFARGAVPPATPAAPLQGLKLPPLTHKYELLEQEPHKVFKGGREWRVDSSRFPISKTVTGVVLDLEPGALRELHWHPNADEWQYVIDGNISVTMFGSHGRIRTEQMEKGDVGYIPQGYGHSIENVGDRPCRVLIGFNTGNYQAIDLSQWIAGNPADVLATNFSKPTSLFEKFPKQDVFIAPGK

SEQ ID NO: 803 - DNA, 1077 bp, synthetic construct
  misc_feature 1..1077: note = Variant of oxalate decarboxylase from Gemmata sp. SH-PL17
  source 1..1077: mol_type = other DNA
atgggtgaccctacctttatgaacaatgtaccagaccctgtgctgtcgggcaaagatttgccgacgttcaagtttgaactggaaaagagcaagggcaaagtcattggggggagttcgggaaaagaagcaaccgttgtccagttacctatctccaaaggcattgctggtgtgagcatgacccttgaaccgggtgcgatgcgcgaattgcactggcatgccacagcagcagagtgggggttcgtattaaccggccacgtccgtacgacggtgatcgatccacaaggtgcggccgaaaccaacgactttggaccgggcgacgtgtggtattttcctcgcggtcatgggcacatgctggaatgcctgggcgataaaccggcgcatttcattctgatcttcgataacggctacttctcagagtttggcaccttctctattactgactggatcggtcacacaccgaaagcgcttctcgccaagaactttggtctgcccgaatcggcttttgatgggtttcccaaaaaagaggtctattttgcacgtggcgcggttccaccagccacccctgcagcgcctttacagggactgaagctgccaccactcacgcataaatacgaactcctcgaacaagaacctcacaaagtttttaaaggtggtcgtgaatggcgcgtggatagctcgcgttttcccatttccaagactgtaaccggcgttgttcttgatttggaacccggcgcgttacgcgagcttcactggcatcctaatgctgacgagtggcaatatgtgatcgatggcaacattagtgtgacgatgttcggttctcatggccgtatgcgcaccgaacagatggagaagggtgatgtcgggtatattccacaggggtatggccacagcatcgaaaatgttggagatcgtccttgtcgcgtcttgattggctttaacacaggtaactaccaagcgatcgacttatcacagtggattgcaggtaatcccgcggatgttcttgccacgaacttctccaaacccaccagcctctttgaaaagttcccaaaacaggacgtgtttattgctcctggcaag

SEQ ID NO: 804 - protein, 359 aa, synthetic construct
  REGION 1..359: note = Variant of oxalate decarboxylase from Gemmata sp. SH-PL17
MGDPTFMNNVPDPVLSGKDLPTFKFELEKSKGKVIGGSSGKEATVVQLPISKGIAGVSMTLEPGAMRELHWHATAAEWGFVLTGHVRTTVIDPQGAAETNDFGPGDVWYFPRGHGHMLECLGDKPAHFILIFDNGYFSEFGTFSITDWIGHTPKALLAKNFGLPESAFDGFPKKEVYFARGAVPPATPAAPLQGLKLPPLTHKYELLEQEPHKVFKGGREWRVDSSRFPISKTVTGVVLDLEPGALRELHWHPNADEWQYVIDGNISVTMFGSHGRMRTEQMEKGDVGYIPQGYGHSIENVGDRPCRVLIGFNTGNYQAIDLSQWIAGNPADVLATNFSKPTSLFEKFPKQDVFIAPGK

SEQ ID NO: 805 - DNA, 1077 bp, synthetic construct
  misc_feature 1..1077: note = Variant of oxalate decarboxylase from Gemmata sp. SH-PL17
  source 1..1077: mol_type = other DNA
atgggtgacccttcgtttatgaacaatgtaccagaccctgtgctgtcgggcaaagatttgccgacgttcaagtttgaactggaaaagagcaagggcaaagtcattggggggagttcgggaaaagaagcaaccgttgtccagttacctatctccaaaggcattgctggtgtgagcatgacccttgaaccgggtgcgatgcgcgaattgcactggcatgccacagcagcagagtgggggttcgtattaaccggccacgtccgtacgacggtgatcgatccacaaggtgcggccgaaaccaacgactttggaccgggcgacgtgtggtattttcctcgcggtcatgggcacatgctggaatgcctgggcgataaaccggcgcatttcattctgatcttcgataacggctacttctcagagtttggcaccttctctattactgactggatcggtcacacaccgaaagcgcttctcgccaagaactttggtctgcccgaatcggcttttgatgggtttcccaaaaaagaggtctattttgcacgtggcgcggttccaccagccacccctgcagcgcctttacagggactgaagctgccaccactcacgcataaatacgaactcctcgaacaagaacctcacaaagtttttaaaggtggtcgtgaatggcgcgtggatagctcgcgttttcccatttccaagactgtaaccggcgttgttcttgatttggaacccggcgcgttacgcgagcttcactggcatcctaatgctgacgagtggcaatatgtgatcgatggcaacattagtgtgacgatgttcggttctcatggccgttaccgcaccgaacagatggagaagggtgatgtcgggtatattccacaggggtatggccacagcatcgaaaatgttggagatcgtccttgtcgcgtcttgattggctttaacacaggtaactaccaagcgatcgacttatcacagtggattgcaggtaatcccgcggatgttcttgccacgaacttctccaaacccaccagcctctttgaaaagttcccaaaacaggacgtgtttattgctcctggcaag

SEQ ID NO: 806 - protein, 359 aa, synthetic construct
  REGION 1..359: note = Variant of oxalate decarboxylase from Gemmata sp. SH-PL17
MGDPSFMNNVPDPVLSGKDLPTFKFELEKSKGKVIGGSSGKEATVVQLPISKGIAGVSMTLEPGAMRELHWHATAAEWGFVLTGHVRTTVIDPQGAAETNDFGPGDVWYFPRGHGHMLECLGDKPAHFILIFDNGYFSEFGTFSITDWIGHTPKALLAKNFGLPESAFDGFPKKEVYFARGAVPPATPAAPLQGLKLPPLTHKYELLEQEPHKVFKGGREWRVDSSRFPISKTVTGVVLDLEPGALRELHWHPNADEWQYVIDGNISVTMFGSHGRYRTEQMEKGDVGYIPQGYGHSIENVGDRPCRVLIGFNTGNYQAIDLSQWIAGNPADVLATNFSKPTSLFEKFPKQDVFIAPGK

SEQ ID NO: 807 - DNA, 1077 bp, synthetic construct
  misc_feature 1..1077: note = Variant of oxalate decarboxylase from Gemmata sp. SH-PL17
  source 1..1077: mol_type = other DNA
atgggtgaccctacctttatgaacaatgtaccagaccctgtgctgtcgggcaaagatttgccgacgttcaagtttgaactggaaaagagcaagggcaaagtcattggggggagttcgggaaaagaagcaaccgttgtccagttacctatctccaaaggcattgctggtgtgagcatgacccttgaaccgggtgcgatgcgcgaattgcactggcatgccacagcagcagagtgggggttcgtattaaccggccacgtccgtacgacggtgatcgatccacaaggtgcggccgaaaccaacgactttggaccgggcgacgtgtggtattttcctcgcggtcatgggcacatgctggaatgcctgggcgataaaccggcgcatttcattctgatcttcgataacggctacttctcagagtttggcaccttctctattactgactggatcggtcacacaccgaaagcgcttctcgccaagaactttggtctgcccgaatcggcttttgatgggtttcccaaaaaagaggtctattttgcacgtggcgcggttccaccagccacccctgcagcgcctttacagggactgaagctgccaccactcacgcataaatacgaactcctcgaacaagaacctcacaaagtttttaaaggtggtcgtgaatggcgcgtggatagctcgcgttttcccatttccaagactgtaaccggcgttgttcttgatttggaacccggcgcgttacgcgagcttcactggcatcctaatgctgacgagtggcaatatgtgatcgatggcaacattagtgtgacgatgttcggttctcatggccgttaccgcaccgaacagatggagaagggtgatgtcgggtatattccacaggggtatggccacagcatcgaaaatgttggagatcgtccttgtcgcgtcttgattggctttaacacaggtaactaccaagcgatcgacttatcacagtggattgcaggtaatcccgcggatgttcttgccacgaacttctccaaaccccggagcctctttgaaaagttcccaaaacaggacgtgtttattgctcctggcaag

SEQ ID NO: 808 - protein, 359 aa, synthetic construct
  REGION 1..359: note = Variant of oxalate decarboxylase from Gemmata sp. SH-PL17
MGDPTFMNNVPDPVLSGKDLPTFKFELEKSKGKVIGGSSGKEATVVQLPISKGIAGVSMTLEPGAMRELHWHATAAEWGFVLTGHVRTTVIDPQGAAETNDFGPGDVWYFPRGHGHMLECLGDKPAHFILIFDNGYFSEFGTFSITDWIGHTPKALLAKNFGLPESAFDGFPKKEVYFARGAVPPATPAAPLQGLKLPPLTHKYELLEQEPHKVFKGGREWRVDSSRFPISKTVTGVVLDLEPGALRELHWHPNADEWQYVIDGNISVTMFGSHGRYRTEQMEKGDVGYIPQGYGHSIENVGDRPCRVLIGFNTGNYQAIDLSQWIAGNPADVLATNFSKPRSLFEKFPKQDVFIAPGK

SEQ ID NO: 809 - DNA, 1077 bp, synthetic construct
  misc_feature 1..1077: note = Variant of oxalate decarboxylase from Gemmata sp. SH-PL17
  source 1..1077: mol_type = other DNA
atgggtgaccctacctttatgaacaatgtaccagaccctgtgctgtcgggcaaagatttgccgacgttcaagtttgaactggaaaagagcaagggcaaagtcattggggggagttcgggaaaagaagcaaccgttgtccagttacctatctccaaaggcattgctggtgtgagcatgacccttgaaccgggtgcgatgcgcgaattgcactggcatgccacagcagcagagtgggggttcgtattaaccggccacgtccgtacgacggtgatcgatccacaaggtgcggccgaaaccaacgactttggaccgggcgacgtgtggtattttcctcgcggtcatgggcacatgctggaatgcctgggcgataaaccggcgcatttcattctgatcttcgataacggctacttctcagagtttggcaccttctctattactgactggatcggtcacacaccgaaagcgcttctcgccaagaactttggtctgcccgaatcggcttttgatgggtttcccaaaaaagaggtctattttgcacgtggcgcggttccaccagccacccctgcagcgcctttacagggactgaagctgccaccactcacgcataaatacgaactcctcgaacaagaacctcacaaagtttttaaaggtggtcgtgaatggcgcgtggatagctcgcgttttcccatttccaagactgtaaccggcgttgttcttgatttggaacccggcgcgttacgcgagcttcactggcatcctaatgctgacgagtggcaatatgtgatcgatggcaacattagtgtgacgatgttcggttctcatggccgtgtgcgcaccgaacagatggagaagggtgatgtcgggtatattccacaggggtatggccacagcatcgaaaatgttggagatcgtccttgtcgcgtcttgattggctttaacacaggtaactaccaagcgatcgacttatcacagtggattgcaggtaatcccgcggatgttcttgccacgaacttctccaaacccaccagcctctttgaaaagttcccaaaacaggacgtgtttattgctcctggcaag

SEQ ID NO: 810 - protein, 359 aa, synthetic construct
  REGION 1..359: note = Variant of oxalate decarboxylase from Gemmata sp. SH-PL17
MGDPTFMNNVPDPVLSGKDLPTFKFELEKSKGKVIGGSSGKEATVVQLPISKGIAGVSMTLEPGAMRELHWHATAAEWGFVLTGHVRTTVIDPQGAAETNDFGPGDVWYFPRGHGHMLECLGDKPAHFILIFDNGYFSEFGTFSITDWIGHTPKALLAKNFGLPESAFDGFPKKEVYFARGAVPPATPAAPLQGLKLPPLTHKYELLEQEPHKVFKGGREWRVDSSRFPISKTVTGVVLDLEPGALRELHWHPNADEWQYVIDGNISVTMFGSHGRVRTEQMEKGDVGYIPQGYGHSIENVGDRPCRVLIGFNTGNYQAIDLSQWIAGNPADVLATNFSKPTSLFEKFPKQDVFIAPGK

SEQ ID NO: 811 - DNA, 1077 bp, synthetic construct
  misc_feature 1..1077: note = Variant of oxalate decarboxylase from Gemmata sp. SH-PL17
  source 1..1077: mol_type = other DNA
atgggtgaccctacctttatgaacaatgtaccagaccctgtgctgtcgggcaaagatttgccgacgttcaagtttgaactggaaaagagcaagggcaaagtcattggggggagttcgggaaaagaagcaaccgttgtccagttacctatctccaaaggcattgctggtgtgagcatgcggcttgaaccgggtgcgatgcgcgaattgcactggcatgccacagcagcagagtgggggttcgtattaaccggccacgtccgtacgacggtgatcgatccacaaggtgcggccgaaaccaacgactttggaccgggcgacgtgtggtattttcctcgcggtcatgggcacatgctggaatgcctgggcgataaaccggcgcatttcattctgatcttcgataacggctacttctcagagtttggcaccttctctattactgactggatcggtcacacaccgaaagcgcttctcgccaagaactttggtctgcccgaatcggcttttgatgggtttcccaaaaaagaggtctattttgcacgtggcgcggttccaccagccacccctgcagcgcctttacagggactgaagctgccaccactcacgcataaatacgaactcctcgaacaagaacctcacaaagtttttaaaggtggtcgtgaatggcgcgtggatagctcgcgttttcccatttccaagactgtaaccggcgttgttcttgatttggaacccggcgcgttacgcgagcttcactggcatcctaatgctgacgagtggcaatatgtgatcgatggcaacattagtgtgacgatgttcggttctcatggccgttaccgcaccgaacagatggagaagggtgatgtcgggtatattccacaggggtatggccacagcatcgaaaatgttggagatcgtccttgtcgcgtcttgattggctttaacacaggtaactaccaagcgatcgacttatcacagtggattgcaggtaatcccgcggatgttcttgccacgaacttctccaaacccaccagcctctttgaaaagttcccaaaacaggacgtgtttattgctcctggcaag

SEQ ID NO: 812 - protein, 359 aa, synthetic construct
  REGION 1..359: note = Variant of oxalate decarboxylase from Gemmata sp. SH-PL17
MGDPTFMNNVPDPVLSGKDLPTFKFELEKSKGKVIGGSSGKEATVVQLPISKGIAGVSMRLEPGAMRELHWHATAAEWGFVLTGHVRTTVIDPQGAAETNDFGPGDVWYFPRGHGHMLECLGDKPAHFILIFDNGYFSEFGTFSITDWIGHTPKALLAKNFGLPESAFDGFPKKEVYFARGAVPPATPAAPLQGLKLPPLTHKYELLEQEPHKVFKGGREWRVDSSRFPISKTVTGVVLDLEPGALRELHWHPNADEWQYVIDGNISVTMFGSHGRYRTEQMEKGDVGYIPQGYGHSIENVGDRPCRVLIGFNTGNYQAIDLSQWIAGNPADVLATNFSKPTSLFEKFPKQDVFIAPGK

SEQ ID NO: 813 - DNA, 1077 bp, synthetic construct
  misc_feature 1..1077: note = Variant of oxalate decarboxylase from Gemmata sp. SH-PL17
  source 1..1077: mol_type = other DNA
atgggtgaccctacctttatgaacaatgtaccagaccctgtgctgtcgggcaaagatttgccgacgttcaagtttgaactggaaaagagcaagggcaaagtcattggggggagttcgggaaaagaagcaaccgttgtccagttacctatctccaaaggcattgctggtgtgagcatgacccttgaaccgggtgcgatgcgcgaattgcactggcatgccacagcagcagagtgggggttcgtattaaccggccacgtccgtacgacggtgatcgatccacaaggtagggccgaaaccaacgactttggaccgggcgacgtgtggtattttcctcgcggtcatgggcacatgctggaatgcctgggcgataaaccggcgcatttcattctgatcttcgataacggctacttctcagagtttggcaccttctctattactgactggatcggtcacacaccgaaagcgcttctcgccaagaactttggtctgcccgaatcggcttttgatgggtttcccaaaaaagaggtctattttgcacgtggcgcggttccaccagccacccctgcagcgcctttacagggactgaagctgccaccactcacgcataaatacgaactcctcgaacaagaacctcacaaagtttttaaaggtggtcgtgaatggcgcgtggatagctcgcgttttcccatttccaagactgtaaccggcgttgttcttgatttggaacccggcgcgttacgcgagcttcactggcatcctaatgctgacgagtggcaatatgtgatcgatggcaacattagtgtgacgatgttcggttctcatggccgttaccgcaccgaacagatggagaagggtgatgtcgggtatattccacaggggtatggccacagcatcgaaaatgttggagatcgtccttgtcgcgtcttgattggctttaacacaggtaactaccaagcgatcgacttatcacagtggattgcaggtaatcccgcggatgttcttgccacgaacttctccaaacccaccagcctctttgaaaagttcccaaaacaggacgtgtttattgctcctggcaag

SEQ ID NO: 814 - protein, 359 aa, synthetic construct
  REGION 1..359: note = Variant of oxalate decarboxylase from Gemmata sp. SH-PL17
MGDPTFMNNVPDPVLSGKDLPTFKFELEKSKGKVIGGSSGKEATVVQLPISKGIAGVSMTLEPGAMRELHWHATAAEWGFVLTGHVRTTVIDPQGRAETNDFGPGDVWYFPRGHGHMLECLGDKPAHFILIFDNGYFSEFGTFSITDWIGHTPKALLAKNFGLPESAFDGFPKKEVYFARGAVPPATPAAPLQGLKLPPLTHKYELLEQEPHKVFKGGREWRVDSSRFPISKTVTGVVLDLEPGALRELHWHPNADEWQYVIDGNISVTMFGSHGRYRTEQMEKGDVGYIPQGYGHSIENVGDRPCRVLIGFNTGNYQAIDLSQWIAGNPADVLATNFSKPTSLFEKFPKQDVFIAPGK

SEQ ID NO: 815 - DNA, 1077 bp, synthetic construct
  misc_feature 1..1077: note = Variant of oxalate decarboxylase from Gemmata sp. SH-PL17
  source 1..1077: mol_type = other DNA
atgggtgaccctacctttatgaacaatgtaccagaccctgtgctgtcgggcaaagatttgccgacgttcaagtttgaactggaaaagagcaagggcaaagtcattggggggagttcgggaaaagaagcaaccgttgtccagttacctatctccaaaggcattgctggtgtgagcatgacccttgaaccgggtgcgatgcgcgaattgcactggcatgccacagcagcagagtgggggttcgtattaaccggccacgtccgtacgacggtgatcgatccacaaggtgcggccgaaaccaacgactttggaccgggcgacgtgtggtattttcctcgcggtcatgggcacatgctggaatgcctgggcgataaaccggcgcatttcattctgatcttcgataacggctacttctcagagtttggcaccttctctattactgactggatcggtcacacaccgaaagcgcttctcgccaagaactttggtctgcccgaatcggcttttgatgggtttcccaaaaaagaggtctattttgcacgtggcgcggttccaccagccacccctgcagcgcctttacagggactgaagctgccaccactcacgcataaatacgaactcctcgaacaagaacctcacaaagtttttaaaggtggtcgtgaatggcgcgtggatagctcgcgttttcccatttccaagactgtaaccggcgttgttcttgatttggaacccggcgcgttacgcgagcttcactggcatcctaatgctgacgagtggcaatatgtgatcgatggcaacattagtgtgacgatgttcggttctcatggccgttaccgcaccgaacagatggagtcgggtgatgtcgggtatattccacaggggtatggccacagcatcgaaaatgttggagatcgtccttgtcgcgtcttgattggctttaacacaggtaactaccaagcgatcgacttatcacagtggattgcaggtaatcccgcggatgttcttgccacgaacttctccaaacccaccagcctctttgaaaagttcccaaaacaggacgtgtttattgctcctggcaag

SEQ ID NO: 816 - protein, 359 aa, synthetic construct
  REGION 1..359: note = Variant of oxalate decarboxylase from Gemmata sp. SH-PL17
MGDPTFMNNVPDPVLSGKDLPTFKFELEKSKGKVIGGSSGKEATVVQLPISKGIAGVSMTLEPGAMRELHWHATAAEWGFVLTGHVRTTVIDPQGAAETNDFGPGDVWYFPRGHGHMLECLGDKPAHFILIFDNGYFSEFGTFSITDWIGHTPKALLAKNFGLPESAFDGFPKKEVYFARGAVPPATPAAPLQGLKLPPLTHKYELLEQEPHKVFKGGREWRVDSSRFPISKTVTGVVLDLEPGALRELHWHPNADEWQYVIDGNISVTMFGSHGRYRTEQMESGDVGYIPQGYGHSIENVGDRPCRVLIGFNTGNYQAIDLSQWIAGNPADVLATNFSKPTSLFEKFPKQDVFIAPGK

SEQ ID NO: 817 - DNA, 1077 bp, synthetic construct
  misc_feature 1..1077: note = Variant of oxalate decarboxylase from Gemmata sp. SH-PL17
  source 1..1077: mol_type = other DNA
atgggtgaccctacctttatgaacaatgtaccagaccctgtgctgtcgggcaaagatttgccgacgttcaagtttcggctggaaaagagcaagggcaaagtcattggggggagttcgggaaaagaagcaaccgttgtccagttacctatctccaaaggcattgctggtgtgagcatgacccttgaaccgggtgcgatgcgcgaattgcactggcatgccacagcagcagagtgggggttcgtattaaccggccacgtccgtacgacggtgatcgatccacaaggtgcggccgaaaccaacgactttggaccgggcgacgtgtggtattttcctcgcggtcatgggcacatgctggaatgcctgggcgataaaccggcgcatttcattctgatcttcgataacggctacttctcagagtttggcaccttctctattactgactggatcggtcacacaccgaaagcgcttctcgccaagaactttggtctgcccgaatcggcttttgatgggtttcccaaaaaagaggtctattttgcacgtggcgcggttccaccagccacccctgcagcgcctttacagggactgaagctgccaccactcacgcataaatacgaactcctcgaacaagaacctcacaaagtttttaaaggtggtcgtgaatggcgcgtggatagctcgcgttttcccatttccaagactgtaaccggcgttgttcttgatttggaacccggcgcgttacgcgagcttcactggcatcctaatgctgacgagtggcaatatgtgatcgatggcaacattagtgtgacgatgttcggttctcatggccgttaccgcaccgaacagatggagaagggtgatgtcgggtatattccacaggggtatggccacagcatcgaaaatgttggagatcgtccttgtcgcgtcttgattggctttaacacaggtaactaccaagcgatcgacttatcacagtggattgcaggtaatcccgcggatgttcttgccacgaacttctccaaacccaccagcctctttgaaaagttcccaaaacaggacgtgtttattgctcctggcaag

SEQ ID NO: 818 - protein, 359 aa, synthetic construct
  REGION 1..359: note = Variant of oxalate decarboxylase from Gemmata sp. SH-PL17
MGDPTFMNNVPDPVLSGKDLPTFKFRLEKSKGKVIGGSSGKEATVVQLPISKGIAGVSMTLEPGAMRELHWHATAAEWGFVLTGHVRTTVIDPQGAAETNDFGPGDVWYFPRGHGHMLECLGDKPAHFILIFDNGYFSEFGTFSITDWIGHTPKALLAKNFGLPESAFDGFPKKEVYFARGAVPPATPAAPLQGLKLPPLTHKYELLEQEPHKVFKGGREWRVDSSRFPISKTVTGVVLDLEPGALRELHWHPNADEWQYVIDGNISVTMFGSHGRYRTEQMEKGDVGYIPQGYGHSIENVGDRPCRVLIGFNTGNYQAIDLSQWIAGNPADVLATNFSKPTSLFEKFPKQDVFIAPGK

SEQ ID NO: 819 - DNA, 1077 bp, synthetic construct
  misc_feature 1..1077: note = Variant of oxalate decarboxylase from Gemmata sp. SH-PL17
  source 1..1077: mol_type = other DNA
atgggtgaccctacctttatgaacaatgtaccagaccctgtgctgtcgggcaaagatttgccgacgttcaagtttaatctggaaaagagcaagggcaaagtcattggggggagttcgggaaaagaagcaaccgttgtccagttacctatctccaaaggcattgctggtgtgagcatgacccttgaaccgggtgcgatgcgcgaattgcactggcatgccacagcagcagagtgggggttcgtattaaccggccacgtccgtacgacggtgatcgatccacaaggtgcggccgaaaccaacgactttggaccgggcgacgtgtggtattttcctcgcggtcatgggcacatgctggaatgcctgggcgataaaccggcgcatttcattctgatcttcgataacggctacttctcagagtttggcaccttctctattactgactggatcggtcacacaccgaaagcgcttctcgccaagaactttggtctgcccgaatcggcttttgatgggtttcccaaaaaagaggtctattttgcacgtggcgcggttccaccagccacccctgcagcgcctttacagggactgaagctgccaccactcacgcataaatacgaactcctcgaacaagaacctcacaaagtttttaaaggtggtcgtgaatggcgcgtggatagctcgcgttttcccatttccaagactgtaaccggcgttgttcttgatttggaacccggcgcgttacgcgagcttcactggcatcctaatgctgacgagtggcaatatgtgatcgatggcaacattagtgtgacgatgttcggttctcatggccgttaccgcaccgaacagatggagaagggtgatgtcgggtatattccacaggggtatggccacagcatcgaaaatgttggagatcgtccttgtcgcgtcttgattggctttaacacaggtaactaccaagcgatcgacttatcacagtggattgcaggtaatcccgcggatgttcttgccacgaacttctccaaacccaccagcctctttgaaaagttcccaaaacaggacgtgtttattgctcctggcaag

SEQ ID NO: 820 - protein, 359 aa, synthetic construct
  REGION 1..359: note = Variant of oxalate decarboxylase from Gemmata sp. SH-PL17
MGDPTFMNNVPDPVLSGKDLPTFKFNLEKSKGKVIGGSSGKEATVVQLPISKGIAGVSMTLEPGAMRELHWHATAAEWGFVLTGHVRTTVIDPQGAAETNDFGPGDVWYFPRGHGHMLECLGDKPAHFILIFDNGYFSEFGTFSITDWIGHTPKALLAKNFGLPESAFDGFPKKEVYFARGAVPPATPAAPLQGLKLPPLTHKYELLEQEPHKVFKGGREWRVDSSRFPISKTVTGVVLDLEPGALRELHWHPNADEWQYVIDGNISVTMFGSHGRYRTEQMEKGDVGYIPQGYGHSIENVGDRPCRVLIGFNTGNYQAIDLSQWIAGNPADVLATNFSKPTSLFEKFPKQDVFIAPGK

SEQ ID NO: 821 - DNA, 1077 bp, synthetic construct
  misc_feature 1..1077: note = Variant of oxalate decarboxylase from Gemmata sp. SH-PL17
  source 1..1077: mol_type = other DNA
atgggtgaccctacctttatgaacaatgtaccagaccctgtgctgtcgggcaaagatttgccgacgttcaagtttgaactggaaaagagcaagggcaaagtcattggggggagttcgggaaaagaagcaaccgttgtccagttacctatctccaaaggcattgctggtgtgagcatgacccttgaaccgggtgcgatgcgcgaattgcactggcatgccacagcagcagagtgggggttcgtattatggggccacgtccgtacgacggtgatcgatccacaaggtgcggccgaaaccaacgactttggaccgggcgacgtgtggtattttcctcgcggtcatgggcacatgctggaatgcctgggcgataaaccggcgcatttcattctgatcttcgataacggctacttctcagagtttggcaccttctctattactgactggatcggtcacacaccgaaagcgcttctcgccaagaactttggtctgcccgaatcggcttttgatgggtttcccaaaaaagaggtctattttgcacgtggcgcggttccaccagccacccctgcagcgcctttacagggactgaagctgccaccactcacgcataaatacgaactcctcgaacaagaacctcacaaagtttttaaaggtggtcgtgaatggcgcgtggatagctcgcgttttcccatttccaagactgtaaccggcgttgttcttgatttggaacccggcgcgttacgcgagcttcactggcatcctaatgctgacgagtggcaatatgtgatcgatggcaacattagtgtgacgatgttcggttctcatggccgttaccgcaccgaacagatggagaagggtgatgtcgggtatattccacaggggtatggccacagcatcgaaaatgttggagatcgtccttgtcgcgtcttgattggctttaacacaggtaactaccaagcgatcgacttatcacagtggattgcaggtaatcccgcggatgttcttgccacgaacttctccaaacccaccagcctctttgaaaagttcccaaaacaggacgtgtttattgctcctggcaag

SEQ ID NO: 822 - protein, 359 aa, synthetic construct
  REGION 1..359: note = Variant of oxalate decarboxylase from Gemmata sp. SH-PL17
MGDPTFMNNVPDPVLSGKDLPTFKFELEKSKGKVIGGSSGKEATVVQLPISKGIAGVSMTLEPGAMRELHWHATAAEWGFVLWGHVRTTVIDPQGAAETNDFGPGDVWYFPRGHGHMLECLGDKPAHFILIFDNGYFSEFGTFSITDWIGHTPKALLAKNFGLPESAFDGFPKKEVYFARGAVPPATPAAPLQGLKLPPLTHKYELLEQEPHKVFKGGREWRVDSSRFPISKTVTGVVLDLEPGALRELHWHPNADEWQYVIDGNISVTMFGSHGRYRTEQMEKGDVGYIPQGYGHSIENVGDRPCRVLIGFNTGNYQAIDLSQWIAGNPADVLATNFSKPTSLFEKFPKQDVFIAPGK

SEQ ID NO: 823 - DNA, 1077 bp, synthetic construct
  misc_feature 1..1077: note = Variant of oxalate decarboxylase from Gemmata sp. SH-PL17
  source 1..1077: mol_type = other DNA
atgggtgaccctagctttatgaacaatgtaccagaccctctgctgtcgggcaaagatttgccgacgttcaagtttgcgctggaaaagagcaagggcaaagtcattggggggagttcgggaaaagaagcaaccgttgtccagttacctatctccaaaggcattgctggtgtgagcatggtacttgaaccgggtgcgatgcgcgaattgcactggcatgccacagcagcagagtgggggttcgtattatggggccacgtccgtacgacggtgatcgatccacaaggtgcggccgaaaccaacgactttggaccgggcgacgtgtggtattttcctcgcggtcatgggcacatgctggaatgcctgggcgataaaccggcgcatttcattctgatcttcgataacggctacttctcagagtttggcaccttctctattactgactggatcggtcacacaccgaaagcgcttctcgccaagaactttaagctgcccgaaagcgcttttgatgggtttcccaaaaaagaggtctattttgcacgtggcgcggttccaccagccacccctgcagcgcctttacagggactgaagctgccaccactcacgcataaatacgaactcctcgaacaagaacctcataaagtttttaaaggtggtcgtgaatggcgcgtggatagcactcgttttcccatttccaagactgtaaccggcgttgttcttgatttggaacccggcgcgttacgcgagcttcactggcatcctaatgctgacgagtggcaatatgtgatcgatggcaacattagtgtgacgatgttcggttctcatggccgttaccgcaccgaacagatggagaagggtgatgtcgggtatattccacaggggtatggccacagcatcgaaaatgttggagatcgtccttgtcgcgtcttgattggctttaacacaggtaactaccaagcgatcgacttatcacagtggattgcaggtaatcccgcggatgttcttgccacgaacttctccaaaccccgcagcctctttgaaaagttcccaaaacaggacgtgtttattgctcctggcaag

SEQ ID NO: 824 - protein, 359 aa, synthetic construct
  REGION 1..359: note = Variant of oxalate decarboxylase from Gemmata sp. SH-PL17
MGDPSFMNNVPDPLLSGKDLPTFKFALEKSKGKVIGGSSGKEATVVQLPISKGIAGVSMVLEPGAMRELHWHATAAEWGFVLWGHVRTTVIDPQGAAETNDFGPGDVWYFPRGHGHMLECLGDKPAHFILIFDNGYFSEFGTFSITDWIGHTPKALLAKNFKLPESAFDGFPKKEVYFARGAVPPATPAAPLQGLKLPPLTHKYELLEQEPHKVFKGGREWRVDSTRFPISKTVTGVVLDLEPGALRELHWHPNADEWQYVIDGNISVTMFGSHGRYRTEQMEKGDVGYIPQGYGHSIENVGDRPCRVLIGFNTGNYQAIDLSQWIAGNPADVLATNFSKPRSLFEKFPKQDVFIAPGK

SEQ ID NO: 825 - DNA, 1077 bp, synthetic construct
  misc_feature 1..1077: note = Variant of oxalate decarboxylase from Gemmata sp. SH-PL17
  source 1..1077: mol_type = other DNA
atgggtgaccctagctttatgaacaatgtaccagaccctctgctgtcgggcaaagatttgccgacgttcaagtttgcgctggaaaagagcaagggcaaagtcattggggggagttcgggaaaagaagcaaccgttgtccagttacctatctccaaaggcattgctggtgtgagcatggtacttgaaccgggtgcgatgcgcgaattgcactggcatgccacagcagcagagtgggggttcgtattaaccggccacgtccgtacgacggtgatcgatccacaaggtgcggccgaaaccaacgactttggaccgggcgacgtgtggtattttcctcgcggtcatgggcacatgctggaatgcctgggcgataaaccggcgcatttcattctgatcttcgataacggctacttctcagagtttggcaccttctctattactgactggatcggtcacacaccgaaagcgcttctcgccaagaactttaagctgcccgaaagcgcttttgatgggtttcccaaaaaagaggtctattttgcacgtggcgcggttccaccagccacccctgcagcgcctttacagggactgaagctgccaccactcacgcataaatacgaactcctcgaacaagaacctcataaagtttttaaaggtggtcgtgaatggcgcgtggatagcactcgttttcccatttccaagactgtaaccggcgttgttcttgatttggaacccggcgcgttacgcgagcttcactggcatcctaatgctgacgagtggcaatatgtgatcgatggcaacattagtgtgacgatgttcggttctcatggccgtactcgcaccgaacagatggagaagggtgatgtcgggtatattccacaggggtatggccacagcatcgaaaatgttggagatcgtccttgtcgcgtcttgattggctttaacacaggtaactaccaagcgatcgacttatcacagtggattgcaggtaatcccgcggatgttcttgccacgaacttctccaaacccaccagcctctttgaaaagttcccaaaacaggacgtgtttattgctcctggcaag

SEQ ID NO: 826 - protein, 359 aa, synthetic construct
  REGION 1..359: note = Variant of oxalate decarboxylase from Gemmata sp. SH-PL17
MGDPSFMNNVPDPLLSGKDLPTFKFALEKSKGKVIGGSSGKEATVVQLPISKGIAGVSMVLEPGAMRELHWHATAAEWGFVLTGHVRTTVIDPQGAAETNDFGPGDVWYFPRGHGHMLECLGDKPAHFILIFDNGYFSEFGTFSITDWIGHTPKALLAKNFKLPESAFDGFPKKEVYFARGAVPPATPAAPLQGLKLPPLTHKYELLEQEPHKVFKGGREWRVDSTRFPISKTVTGVVLDLEPGALRELHWHPNADEWQYVIDGNISVTMFGSHGRTRTEQMEKGDVGYIPQGYGHSIENVGDRPCRVLIGFNTGNYQAIDLSQWIAGNPADVLATNFSKPTSLFEKFPKQDVFIAPGK

SEQ ID NO: 827 - DNA, 1077 bp, synthetic construct
  misc_feature 1..1077: note = Variant of oxalate decarboxylase from Gemmata sp. SH-PL17
  source 1..1077: mol_type = other DNA
atgggtgaccctagctttatgaacaatgtaccagaccctctgctgtcgggcaaagatttgccgacgttcaagtttgagctggaaaagagcaagggcaaagtcattggggggagttcgggaaaagaagcaaccgttgtccagttacctatctccaaaggcattgctggtgtgagcatggtacttgaaccgggtgcgatgcgcgaattgcactggcatgccacagcagcagagtgggggttcgtattaaccggccacgtccgtacgacggtgatcgatccacaaggtctggccgaaaccaacgactttggaccgggcgacgtgtggtattttcctcgcggtcatgggcacatgctggaatgcctgggcgataaaccggcgcatttcattctgatcttcgataacggctacttctcagagtttggcaccttctctattactgactggatcggtcacacaccgaaagcgcttctcgccaagaactttaagctgcccgaatcggcttttgatgggtttcccaaaaaagaggtctattttgcacgtggcgcggttccaccagccacccctgcagcgcctttacagggactgaagctgccaccactcacgcataaatacgaactcctcgaacaagaacctcataaagtttttaaaggtggtcgtgaatggcgcgtggatagcactcgttttcccatttccaagactgtaaccggcgttgttcttgatttggaacccggcgcgttacgcgagcttcactggcatcctaatgctgacgagtggcaatatgtgatcgatggcaacattagtgtgacgatgttcggttctcatggccgtactcgcaccgaacagatggagaagggtgatgtcgggtatattccacaggggtatggccacagcatcgaaaatgttggagatcgtccttgtcgcgtcttgattggctttaacacaggtaactaccaagcgatcgacttatcacagtggattgcaggtaatcccgcggatgttcttgccacgaacttctccaaacccaccagcctctttgaaaagttcccaaaacaggacgtgtttattgctcctggcaag

SEQ ID NO: 828 - protein, 359 aa, synthetic construct
  REGION 1..359: note = Variant of oxalate decarboxylase from Gemmata sp. SH-PL17
MGDPSFMNNVPDPLLSGKDLPTFKFELEKSKGKVIGGSSGKEATVVQLPISKGIAGVSMVLEPGAMRELHWHATAAEWGFVLTGHVRTTVIDPQGLAETNDFGPGDVWYFPRGHGHMLECLGDKPAHFILIFDNGYFSEFGTFSITDWIGHTPKALLAKNFKLPESAFDGFPKKEVYFARGAVPPATPAAPLQGLKLPPLTHKYELLEQEPHKVFKGGREWRVDSTRFPISKTVTGVVLDLEPGALRELHWHPNADEWQYVIDGNISVTMFGSHGRTRTEQMEKGDVGYIPQGYGHSIENVGDRPCRVLIGFNTGNYQAIDLSQWIAGNPADVLATNFSKPTSLFEKFPKQDVFIAPGK

SEQ ID NO: 829 - DNA, 1077 bp, synthetic construct
  misc_feature 1..1077: note = Variant of oxalate decarboxylase from Gemmata sp. SH-PL17
  source 1..1077: mol_type = other DNA
atgggtgaccctagctttatgaacaatgtaccagaccctctgctgtcgggcaaagatttgccgacgttcaagtttgagctggaaaagagcaagggcaaagtcattggggggagttcgggaaaagaagcaaccgttgtccagttacctatctccaaaggcattgctggtgtgagcatggtacttgaaccgggtgcgatgcgcgaattgcactggcatgccacagcagcagagtgggggttcgtattatggggccacgtccgtacgacggtgatcgatccacaaggtgcggccgaaaccaacgactttggaccgggcgacgtgtggtattttcctcgcggtcatgggcacatgctggaatgcctgggcgataaaccggcgcatttcattctgatcttcgataacggctacttctcagagtttggcaccttctctattactgactggatcggtcacacaccgaaagcgcttctcgccaagaactttaagctgcccgaaagcgcttttgatgggtttcccaaaaaagaggtctattttgcacgtggcgcggttccaccagccacccctgcagcgcctttacagggactgaagctgccaccactcacgcataaatacgaactcctcgaacaagaacctcataaagtttttaaaggtggtcgtgaatggcgcgtggatagcactcgttttcccatttccaagactgtaaccggcgttgttcttgatttggaacccggcgcgttacgcgagcttcactggcatcctaatgctgacgagtggcaatatgtgatcgatggcaacattagtgtgacgatgttcggttctcatggccgtactcgcaccgaacagatggagaagggtgatgtcgggtatattccacaggggtatggccacagcatcgaaaatgttggagatcgtccttgtcgcgtcttgattggctttaacacaggtaactaccaagcgatcgacttatcacagtggattgcaggtaatcccgcggatgttcttgccacgaacttctccaaaccccgcagcctctttgaaaagttcccaaaacaggacgtgtttattgctcctggcaag

SEQ ID NO: 830 - protein, 359 aa, synthetic construct
  REGION 1..359: note = Variant of oxalate decarboxylase from Gemmata sp. SH-PL17
MGDPSFMNNVPDPLLSGKDLPTFKFELEKSKGKVIGGSSGKEATVVQLPISKGIAGVSMVLEPGAMRELHWHATAAEWGFVLWGHVRTTVIDPQGAAETNDFGPGDVWYFPRGHGHMLECLGDKPAHFILIFDNGYFSEFGTFSITDWIGHTPKALLAKNFKLPESAFDGFPKKEVYFARGAVPPATPAAPLQGLKLPPLTHKYELLEQEPHKVFKGGREWRVDSTRFPISKTVTGVVLDLEPGALRELHWHPNADEWQYVIDGNISVTMFGSHGRTRTEQMEKGDVGYIPQGYGHSIENVGDRPCRVLIGFNTGNYQAIDLSQWIAGNPADVLATNFSKPRSLFEKFPKQDVFIAPGK

SEQ ID NO: 831 - DNA, 1077 bp, synthetic construct
  misc_feature 1..1077: note = Variant of oxalate decarboxylase from Gemmata sp. SH-PL17
  source 1..1077: mol_type = other DNA
atgggtgaccctacctttatgaacaatgtaccagaccctctgctgtcgggcaaagatttgccgacgttcaagtttgcgctggaaaagagcaagggcaaagtcattggggggagttcgggaaaagaagcaaccgttgtccagttacctatctccaaaggcattgctggtgtgagcatggtacttgaaccgggtgcgatgcgcgaattgcactggcatgccacagcagcagagtgggggttcgtattatggggccacgtccgtacgacggtgatcgatccacaaggtgcggccgaaaccaacgactttggaccgggcgacgtgtggtattttcctcgcggtcatgggcacatgctggaatgcctgggcgataaaccggcgcatttcattctgatcttcgataacggctacttctcagagtttggcaccttctctattactgactggatcggtcacacaccgaaagcgcttctcgccaagaactttaagctgcccgaaagcgcttttgatgggtttcccaaaaaagaggtctattttgcacgtggcgcggttccaccagccacccctgcagcgcctttacagggactgaagctgccaccactcacgcataaatacgaactcctcgaacaagaacctcataaagtttttaaaggtggtcgtgaatggcgcgtggatagcactcgttttcccatttccaagactgtaaccggcgttgttcttgatttggaacccggcgcgttacgcgagcttcactggcatcctaatgctgacgagtggcaatatgtgatcgatggcaacattagtgtgacgatgttcggttctcatggccgtactcgcaccgaacagatggagaagggtgatgtcgggtatattccacaggggtatggccacagcatcgaaaatgttggagatcgtccttgtcgcgtcttgattggctttaacacaggtaactaccaagcgatcgacttatcacagtggattgcaggtaatcccgcggatgttcttgccacgaacttctccaaacccaccagcctctttgaaaagttcccaaaacaggacgtgtttattgctcctggcaag

SEQ ID NO: 832 - protein, 359 aa, synthetic construct
  REGION 1..359: note = Variant of oxalate decarboxylase from Gemmata sp. SH-PL17
MGDPTFMNNVPDPLLSGKDLPTFKFALEKSKGKVIGGSSGKEATVVQLPISKGIAGVSMVLEPGAMRELHWHATAAEWGFVLWGHVRTTVIDPQGAAETNDFGPGDVWYFPRGHGHMLECLGDKPAHFILIFDNGYFSEFGTFSITDWIGHTPKALLAKNFKLPESAFDGFPKKEVYFARGAVPPATPAAPLQGLKLPPLTHKYELLEQEPHKVFKGGREWRVDSTRFPISKTVTGVVLDLEPGALRELHWHPNADEWQYVIDGNISVTMFGSHGRTRTEQMEKGDVGYIPQGYGHSIENVGDRPCRVLIGFNTGNYQAIDLSQWIAGNPADVLATNFSKPTSLFEKFPKQDVFIAPGK

SEQ ID NO: 833 - DNA, 1077 bp, synthetic construct
  misc_feature 1..1077: note = Variant of oxalate decarboxylase from Gemmata sp. SH-PL17
  source 1..1077: mol_type = other DNA
atgggtgaccctagctttatgaacaatgtaccagaccctctgctgtcgggcaaagatttgccgacgttcaagtttgcgctggaaaagagcaagggcaaagtcattggggggagttcgggaaaagaagcaaccgttgtccagttacctatctccaaaggcattgctggtgtgagcatggtacttgaaccgggtgcgatgcgcgaattgcactggcatgccacagcagcagagtgggggttcgtattatggggccacgtccgtacgacggtgatcgatccacaaggtgcggccgaaaccaacgactttggaccgggcgacgtgtggtattttcctcgcggtcatgggcacatgctggaatgcctgggcgataaaccggcgcatttcattctgatcttcgataacggctacttctcagagtttggcaccttctctattactgactggatcggtcacacaccgaaagcgcttctcgccaagaactttaagctgcccgaatcggcttttgatgggtttcccaaaaaagaggtctattttgcacgtggcgcggttccaccagccacccctgcagcgcctttacagggactgaagctgccaccactcacgcataaatacgaactcctcgaacaagaacctcataaagtttttaaaggtggtcgtgaatggcgcgtggatagcactcgttttcccatttccaagactgtaaccggcgttgttcttgatttggaacccggcgcgttacgcgagcttcactggcatcctaatgctgacgagtggcaatatgtgatcgatggcaacattagtgtgacgatgttcggttctcatggccgtgtacgcaccgaacagatggagaagggtgatgtcgggtatattccacaggggtatggccacagcatcgaaaatgttggagatcgtccttgtcgcgtcttgattggctttaacacaggtaactaccaagcgatcgacttatcacagtggattgcaggtaatcccgcggatgttcttgccacgaacttctccaaacccaccagcctctttgaaaagttcccaaaacaggacgtgtttattgctcctggcaag

SEQ ID NO: 834 - protein, 359 aa, synthetic construct
  REGION 1..359: note = Variant of oxalate decarboxylase from Gemmata sp. SH-PL17
MGDPSFMNNVPDPLLSGKDLPTFKFALEKSKGKVIGGSSGKEATVVQLPISKGIAGVSMVLEPGAMRELHWHATAAEWGFVLWGHVRTTVIDPQGAAETNDFGPGDVWYFPRGHGHMLECLGDKPAHFILIFDNGYFSEFGTFSITDWIGHTPKALLAKNFKLPESAFDGFPKKEVYFARGAVPPATPAAPLQGLKLPPLTHKYELLEQEPHKVFKGGREWRVDSTRFPISKTVTGVVLDLEPGALRELHWHPNADEWQYVIDGNISVTMFGSHGRVRTEQMEKGDVGYIPQGYGHSIENVGDRPCRVLIGFNTGNYQAIDLSQWIAGNPADVLATNFSKPTSLFEKFPKQDVFIAPGK

SEQ ID NO: 835 - DNA, 1077 bp, synthetic construct
  misc_feature 1..1077: note = Variant of oxalate decarboxylase from Gemmata sp. SH-PL17
  source 1..1077: mol_type = other DNA
atgggtgaccctagctttatgaacaatgtaccagaccctctgctgtcgggcaaagatttgccgacgttcaagtttgagctggaaaagagcaagggcaaagtcattggggggagttcgggaaaagaagcaaccgttgtccagttacctatctccaaaggcattgctggtgtgagcatggtacttgaaccgggtgcgatgcgcgaattgcactggcatgccacagcagcagagtgggggttcgtattaaccggccacgtccgtacgacggtgatcgatccacaaggtgccgccgaaaccaacgactttggaccgggcgacgtgtggtattttcctcgcggtcatgggcacatgctggaatgcctgggcgataaaccggcgcatttcattctgatcttcgataacggctacttctcagagtttggcaccttctctattactgactggatcggtcacacaccgaaagcgcttctcgccaagaactttaagctgcccgaaagcgcttttgatgggtttcccaaaaaagaggtctattttgcacgtggcgcggttccaccagccacccctgcagcgcctttacagggactgaagctgccaccactcacgcataaatacgaactcctcgaacaagaacctcataaagtttttaaaggtggtcgtgaatggcgcgtggatagcactcgttttcccatttccaagactgtaaccggcgttgttcttgatttggaacccggcgcgttacgcgagcttcactggcatcctaatgctgacgagtggcaatatgtgatcgatggcaacattagtgtgacgatgttcggttctcatggccgtactcgcaccgaacagatggagaagggtgatgtcgggtatattccacaggggtatggccacagcatcgaaaatgttggagatcgtccttgtcgcgtcttgattggctttaacacaggtaactaccaagcgatcgacttatcacagtggattgcaggtaatcccgcggatgttcttgccacgaacttctccaaaccccgcagcctctttgaaaagttcccaaaacaggacgtgtttattgctcctggcaag

SEQ ID NO: 836 - protein, 359 aa, synthetic construct
  REGION 1..359: note = Variant of oxalate decarboxylase from Gemmata sp. SH-PL17
MGDPSFMNNVPDPLLSGKDLPTFKFELEKSKGKVIGGSSGKEATVVQLPISKGIAGVSMVLEPGAMRELHWHATAAEWGFVLTGHVRTTVIDPQGAAETNDFGPGDVWYFPRGHGHMLECLGDKPAHFILIFDNGYFSEFGTFSITDWIGHTPKALLAKNFKLPESAFDGFPKKEVYFARGAVPPATPAAPLQGLKLPPLTHKYELLEQEPHKVFKGGREWRVDSTRFPISKTVTGVVLDLEPGALRELHWHPNADEWQYVIDGNISVTMFGSHGRTRTEQMEKGDVGYIPQGYGHSIENVGDRPCRVLIGFNTGNYQAIDLSQWIAGNPADVLATNFSKPRSLFEKFPKQDVFIAPGK

SEQ ID NO: 837 - DNA, 1077 bp, synthetic construct
  misc_feature 1..1077: note = Variant of oxalate decarboxylase from Gemmata sp. SH-PL17
  source 1..1077: mol_type = other DNA
atgggtgaccctagctttatgaacaatgtaccagaccctctgctgtcgggcaaagatttgccgacgttcaagtttgagctggaaaagagcaagggcaaagtcattggggggagttcgggaaaagaagcaaccgttgtccagttacctatctccaaaggcattgctggtgtgagcatggtacttgaaccgggtgcgatgcgcgaattgcactggcatgccacagcagcagagtgggggttcgtattatggggccacgtccgtacgacggtgatcgatccacaaggtgcggccgaaaccaacgactttggaccgggcgacgtgtggtattttcctcgcggtcatgggcacatgctggaatgcctgggcgataaaccggcgcatttcattctgatcttcgataacggctacttctcagagtttggcaccttctctattactgactggatcggtcacacaccgaaagcgcttctcgccaagaactttaagctgcccgaaagcgcttttgatgggtttcccaaaaaagaggtctattttgcacgtggcgcggttccaccagccacccctgcagcgcctttacagggactgaagctgccaccactcacgcataaatacgaactcctcgaacaagaacctcataaagtttttaaaggtggtcgtgaatggcgcgtggatagcactcgttttcccatttccaagactgtaaccggcgttgttcttgatttggaacccggcgcgttacgcgagcttcactggcatcctaatgctgacgagtggcaatatgtgatcgatggcaacattagtgtgacgatgttcggttctcatggccgtgtacgcaccgaacagatggagaagggtgatgtcgggtatattccacaggggtatggccacagcatcgaaaatgttggagatcgtccttgtcgcgtcttgattggctttaacacaggtaactaccaagcgatcgacttatcacagtggattgcaggtaatcccgcggatgttcttgccacgaacttctccaaaccccgcagcctctttgaaaagttcccaaaacaggacgtgtttattgctcctggcaag

SEQ ID NO: 838 - protein, 359 aa, synthetic construct
  REGION 1..359: note = Variant of oxalate decarboxylase from Gemmata sp. SH-PL17
MGDPSFMNNVPDPLLSGKDLPTFKFELEKSKGKVIGGSSGKEATVVQLPISKGIAGVSMVLEPGAMRELHWHATAAEWGFVLWGHVRTTVIDPQGAAETNDFGPGDVWYFPRGHGHMLECLGDKPAHFILIFDNGYFSEFGTFSITDWIGHTPKALLAKNFKLPESAFDGFPKKEVYFARGAVPPATPAAPLQGLKLPPLTHKYELLEQEPHKVFKGGREWRVDSTRFPISKTVTGVVLDLEPGALRELHWHPNADEWQYVIDGNISVTMFGSHGRVRTEQMEKGDVGYIPQGYGHSIENVGDRPCRVLIGFNTGNYQAIDLSQWIAGNPADVLATNFSKPRSLFEKFPKQDVFIAPGK

SEQ ID NO: 839 - DNA, 1077 bp, synthetic construct
  misc_feature 1..1077: note = Variant of oxalate decarboxylase from Gemmata sp. SH-PL17
  source 1..1077: mol_type = other DNA
atgggtgaccctagctttatgaacaatgtaccagaccctctgctgtcgggcaaagatttgccgacgttcaagtttgcgctggaaaagagcaagggcaaagtcattggggggagttcgggaaaagaagcaaccgttgtccagttacctatctccaaaggcattgctggtgtgagcatggtacttgaaccgggtgcgatgcgcgaattgcactggcatgccacagcagcagagtgggggttcgtattaaccggccacgtccgtacgacggtgatcgatccacaaggtgcggccgaaaccaacgactttggaccgggcgacgtgtggtattttcctcgcggtcatgggcacatgctggaatgcctgggcgataaaccggcgcatttcattctgatcttcgataacggctacttctcagagtttggcaccttctctattactgactggatcggtcacacaccgaaagcgcttctcgccaagaactttaagctgcccgaacgcgcttttgatgggtttcccaaaaaagaggtctattttgcacgtggcgcggttccaccagccacccctgcagcgcctttacagggactgaagctgccaccactcacgcataaatacgaactcctcgaacaagaacctcataaagtttttaaaggtggtcgtgaatggcgcgtggatagcactcgttttcccatttccaagactgtaaccggcgttgttcttgatttggaacccggcgcgttacgcgagcttcactggcatcctaatgctgacgagtggcaatatgtgatcgatggcaacattagtgtgacgatgttcggttctcatggccgtactcgcaccgaacagatggagaagggtgatgtcgggtatattccacaggggtatggccacagcatcgaaaatgttggagatcgtccttgtcgcgtcttgattggctttaacacaggtaactaccaagcgatcgacttatcacagtggattgcaggtaatcccgcggatgttcttgccacgaacttctccaaacccaccagcctctttgaaaagttcccaaaacaggacgtgtttattgctcctggcaag

SEQ ID NO: 840 - protein, 359 aa, synthetic construct
  REGION 1..359: note = Variant of oxalate decarboxylase from Gemmata sp. SH-PL17
MGDPSFMNNVPDPLLSGKDLPTFKFALEKSKGKVIGGSSGKEATVVQLPISKGIAGVSMVLEPGAMRELHWHATAAEWGFVLTGHVRTTVIDPQGAAETNDFGPGDVWYFPRGHGHMLECLGDKPAHFILIFDNGYFSEFGTFSITDWIGHTPKALLAKNFKLPERAFDGFPKKEVYFARGAVPPATPAAPLQGLKLPPLTHKYELLEQEPHKVFKGGREWRVDSTRFPISKTVTGVVLDLEPGALRELHWHPNADEWQYVIDGNISVTMFGSHGRTRTEQMEKGDVGYIPQGYGHSIENVGDRPCRVLIGFNTGNYQAIDLSQWIAGNPADVLATNFSKPTSLFEKFPKQDVFIAPGK

SEQ ID NO: 841 - DNA, 1077 bp, synthetic construct
  misc_feature 1..1077: note = Variant of oxalate decarboxylase from Gemmata sp. SH-PL17
  source 1..1077: mol_type = other DNA
atgggtgaccctacctttatgaacaatgtaccagaccctctgctgtcgggcaaagatttgccgacgttcaagtttgagctggaaaagagcaagggcaaagtcattggggggagttcgggaaaagaagcaaccgttgtccagttacctatctccaaaggcattgctggtgtgagcatggtacttgaaccgggtgcgatgcgcgaattgcactggcatgccacagcagcagagtgggggttcgtattatggggccacgtccgtacgacggtgatcgatccacaaggtgcggccgaaaccaacgactttggaccgggcgacgtgtggtattttcctcgcggtcatgggcacatgctggaatgcctgggcgataaaccggcgcatttcattctgatcttcgataacggctacttctcagagtttggcaccttctctattactgactggatcggtcacacaccgaaagcgcttctcgccaagaactttaagctgcccgaaagcgcttttgatgggtttcccaaaaaagaggtctattttgcacgtggcgcggttccaccagccacccctgcagcgcctttacagggactgaagctgccaccactcacgcataaatacgaactcctcgaacaagaacctcataaagtttttaaaggtggtcgtgaatggcgcgtggatagcactcgttttcccatttccaagactgtaaccggcgttgttcttgatttggaacccggcgcgttacgcgagcttcactggcatcctaatgctgacgagtggcaatatgtgatcgatggcaacattagtgtgacgatgttcggttctcatggccgtactcgcaccgaacagatggagaagggtgatgtcgggtatattccacaggggtatggccacagcatcgaaaatgttggagatcgtccttgtcgcgtcttgattggctttaacacaggtaactaccaagcgatcgacttatcacagtggattgcaggtaatcccgcggatgttcttgccacgaacttctccaaaccccgcagcctctttgaaaagttcccaaaacaggacgtgtttattgctcctggcaag

SEQ ID NO: 842 - protein, 359 aa, synthetic construct
  REGION 1..359: note = Variant of oxalate decarboxylase from Gemmata sp. SH-PL17
MGDPTFMNNVPDPLLSGKDLPTFKFELEKSKGKVIGGSSGKEATVVQLPISKGIAGVSMVLEPGAMRELHWHATAAEWGFVLWGHVRTTVIDPQGAAETNDFGPGDVWYFPRGHGHMLECLGDKPAHFILIFDNGYFSEFGTFSITDWIGHTPKALLAKNFKLPESAFDGFPKKEVYFARGAVPPATPAAPLQGLKLPPLTHKYELLEQEPHKVFKGGREWRVDSTRFPISKTVTGVVLDLEPGALRELHWHPNADEWQYVIDGNISVTMFGSHGRTRTEQMEKGDVGYIPQGYGHSIENVGDRPCRVLIGFNTGNYQAIDLSQWIAGNPADVLATNFSKPRSLFEKFPKQDVFIAPGK

SEQ ID NO: 843 - DNA, 1077 bp, synthetic construct
  misc_feature 1..1077: note = Variant of oxalate decarboxylase from Gemmata sp. SH-PL17
  source 1..1077: mol_type = other DNA
atgggtgaccctacctttatgaacaatgtaccagaccctctgctgtcgggcaaagatttgccgacgttcaagtttgagctggaaaagagcaagggcaaagtcattggggggagttcgggaaaagaagcaaccgttgtccagttacctatctccaaaggcattgctggtgtgagcatggtacttgaaccgggtgcgatgcgcgaattgcactggcatgccacagcagcagagtgggggttcgtattacgcggccacgtccgtacgacggtgatcgatccacaaggtctggccgaaaccaacgactttggaccgggcgacgtgtggtattttcctcgcggtcatgggcacatgctggaatgcctgggcgataaaccggcgcatttcattctgatcttcgataacggctacttctcagagtttggcaccttctctattactgactggatcggtcacacaccgaaagcgcttctcgccaagaactttaagctgcccgaatcggcttttgatgggtttcccaaaaaagaggtctattttgcacgtggcgcggttccaccagccacccctgcagcgcctttacagggactgaagctgccaccactcacgcataaatacgaactcctcgaacaagaacctcataaagtttttaaaggtggtcgtgaatggcgcgtggatagcactcgttttcccatttccaagactgtaaccggcgttgttcttgatttggaacccggcgcgttacgcgagcttcactggcatcctaatgctgacgagtggcaatatgtgatcgatggcaacattagtgtgacgatgttcggttctcatggccgtgtacgcaccgaacagatggagaagggtgatgtcgggtatattccacaggggtatggccacagcatcgaaaatgttggagatcgtccttgtcgcgtcttgattggctttaacacaggtaactaccaagcgatcgacttatcacagtggattgcaggtaatcccgcggatgttcttgccacgaacttctccaaaccccgcagcctctttgaaaagttcccaaaacaggacgtgtttattgctcctggcaag

SEQ ID NO: 844 - protein, 359 aa, synthetic construct
  REGION 1..359: note = Variant of oxalate decarboxylase from Gemmata sp. SH-PL17
MGDPTFMNNVPDPLLSGKDLPTFKFELEKSKGKVIGGSSGKEATVVQLPISKGIAGVSMVLEPGAMRELHWHATAAEWGFVLRGHVRTTVIDPQGLAETNDFGPGDVWYFPRGHGHMLECLGDKPAHFILIFDNGYFSEFGTFSITDWIGHTPKALLAKNFKLPESAFDGFPKKEVYFARGAVPPATPAAPLQGLKLPPLTHKYELLEQEPHKVFKGGREWRVDSTRFPISKTVTGVVLDLEPGALRELHWHPNADEWQYVIDGNISVTMFGSHGRVRTEQMEKGDVGYIPQGYGHSIENVGDRPCRVLIGFNTGNYQAIDLSQWIAGNPADVLATNFSKPRSLFEKFPKQDVFIAPGK

SEQ ID NO: 845 - DNA, 1077 bp, synthetic construct
  misc_feature 1..1077: note = Variant of oxalate decarboxylase from Gemmata sp. SH-PL17
  source 1..1077: mol_type = other DNA
atgggtgaccctacctttatgaacaatgtaccagaccctctgctgtcgggcaaagatttgccgacgttcaagtttgagctggaaaagagcaagggcaaagtcattggggggagttcgggaaaagaagcaaccgttgtccagttacctatctccaaaggcattgctggtgtgagcatggtacttgaaccgggtgcgatgcgcgaattgcactggcatgccacagcagcagagtgggggttcgtattatggggccacgtccgtacgacggtgatcgatccacaaggtctggccgaaaccaacgactttggaccgggcgacgtgtggtattttcctcgcggtcatgggcacatgctggaatgcctgggcgataaaccggcgcatttcattctgatcttcgataacggctacttctcagagtttggcaccttctctattactgactggatcggtcacacaccgaaagcgcttctcgccaagaactttaagctgcccgaaagcgcttttgatgggtttcccaaaaaagaggtctattttgcacgtggcgcggttccaccagccacccctgcagcgcctttacagggactgaagctgccaccactcacgcataaatacgaactcctcgaacaagaacctcataaagtttttaaaggtggtcgtgaatggcgcgtggatagcactcgttttcccatttccaagactgtaaccggcgttgttcttgatttggaacccggcgcgttacgcgagcttcactggcatcctaatgctgacgagtggcaatatgtgatcgatggcaacattagtgtgacgatgttcggttctcatggccgtactcgcaccgaacagatggagaagggtgatgtcgggtatattccacaggggtatggccacagcatcgaaaatgttggagatcgtccttgtcgcgtcttgattggctttaacacaggtaactaccaagcgatcgacttatcacagtggattgcaggtaatcccgcggatgttcttgccacgaacttctccaaacccaccagcctctttgaaaagttcccaaaacaggacgtgtttattgctcctggcaag

SEQ ID NO: 846 - protein, 359 aa, synthetic construct
  REGION 1..359: note = Variant of oxalate decarboxylase from Gemmata sp. SH-PL17
MGDPTFMNNVPDPLLSGKDLPTFKFELEKSKGKVIGGSSGKEATVVQLPISKGIAGVSMVLEPGAMRELHWHATAAEWGFVLWGHVRTTVIDPQGLAETNDFGPGDVWYFPRGHGHMLECLGDKPAHFILIFDNGYFSEFGTFSITDWIGHTPKALLAKNFKLPESAFDGFPKKEVYFARGAVPPATPAAPLQGLKLPPLTHKYELLEQEPHKVFKGGREWRVDSTRFPISKTVTGVVLDLEPGALRELHWHPNADEWQYVIDGNISVTMFGSHGRTRTEQMEKGDVGYIPQGYGHSIENVGDRPCRVLIGFNTGNYQAIDLSQWIAGNPADVLATNFSKPTSLFEKFPKQDVFIAPGK

SEQ ID NO: 847 - DNA, 1077 bp, synthetic construct
  misc_feature 1..1077: note = Variant of oxalate decarboxylase from Gemmata sp. SH-PL17
  source 1..1077: mol_type = other DNA
atgggtgaccctacctttatgaacaatgtaccagaccctctgctgtcgggcaaagatttgccgacgttcaagtttgcgctggaaaagagcaagggcaaagtcattggggggagttcgggaaaagaagcaaccgttgtccagttacctatctccaaaggcattgctggtgtgagcatggtacttgaaccgggtgcgatgcgcgaattgcactggcatgccacagcagcagagtgggggttcgtattatggggccacgtccgtacgacggtgatcgatccacaaggtgcggccgaaaccaacgactttggaccgggcgacgtgtggtattttcctcgcggtcatgggcacatgctggaatgcctgggcgataaaccggcgcatttcattctgatcttcgataacggctacttctcagagtttggcaccttctctattactgactggatcggtcacacaccgaaagcgcttctcgccaagaactttaagctgcccgaaagcgcttttgatgggtttcccaaaaaagaggtctattttgcacgtggcgcggttccaccagccacccctgcagcgcctttacagggactgaagctgccaccactcacgcataaatacgaactcctcgaacaagaacctcataaagtttttaaaggtggtcgtgaatggcgcgtggatagcactcgttttcccatttccaagactgtaaccggcgttgttcttgatttggaacccggcgcgttacgcgagcttcactggcatcctaatgctgacgagtggcaatatgtgatcgatggcaacattagtgtgacgatgttcggttctcatggccgtgtacgcaccgaacagatggagaagggtgatgtcgggtatattccacaggggtatggccacagcatcgaaaatgttggagatcgtccttgtcgcgtcttgattggctttaacacaggtaactaccaagcgatcgacttatcacagtggattgcaggtaatcccgcggatgttcttgccacgaacttctccaaaccccgcagcctctttgaaaagttcccaaaacaggacgtgtttattgctcctggcaag

SEQ ID NO: 848 - protein, 359 aa, synthetic construct
  REGION 1..359: note = Variant of oxalate decarboxylase from Gemmata sp. SH-PL17
MGDPTFMNNVPDPLLSGKDLPTFKFALEKSKGKVIGGSSGKEATVVQLPISKGIAGVSMVLEPGAMRELHWHATAAEWGFVLWGHVRTTVIDPQGAAETNDFGPGDVWYFPRGHGHMLECLGDKPAHFILIFDNGYFSEFGTFSITDWIGHTPKALLAKNFKLPESAFDGFPKKEVYFARGAVPPATPAAPLQGLKLPPLTHKYELLEQEPHKVFKGGREWRVDSTRFPISKTVTGVVLDLEPGALRELHWHPNADEWQYVIDGNISVTMFGSHGRVRTEQMEKGDVGYIPQGYGHSIENVGDRPCRVLIGFNTGNYQAIDLSQWIAGNPADVLATNFSKPRSLFEKFPKQDVFIAPGK

SEQ ID NO: 849 - DNA, 1077 bp, synthetic construct
  misc_feature 1..1077: note = Variant of oxalate decarboxylase from Gemmata sp. SH-PL17
  source 1..1077: mol_type = other DNA
atgggtgaccctagctttatgaacaatgtaccagaccctctgctgtcgggcaaagatttgccgacgttcaagtttgcgctggaaaagagcaagggcaaagtcattggggggagttcgggaaaagaagcaaccgttgtccagttacctatctccaaaggcattgctggtgtgagcatggtacttgaaccgggtgcgatgcgcgaattgcactggcatgccacagcagcagagtgggggttcgtattatggggccacgtccgtacgacggtgatcgatccacaaggtgccgccgaaaccaacgactttggaccgggcgacgtgtggtattttcctcgcggtcatgggcacatgctggaatgcctgggcgataaaccggcgcatttcattctgatcttcgataacggctacttctcagagtttggcaccttctctattactgactggatcggtcacacaccgaaagcgcttctcgccaagaactttaagctgcccgaaagcgcttttgatgggtttcccaaaaaagaggtctattttgcacgtggcgcggttccaccagccacccctgcagcgcctttacagggactgaagctgccaccactcacgcataaatacgaactcctcgaacaagaacctcataaagtttttaaaggtggtcgtgaatggcgcgtggatagcactcgttttcccatttccaagactgtaaccggcgttgttcttgatttggaacccggcgcgttacgcgagcttcactggcatcctaatgctgacgagtggcaatatgtgatcgatggcaacattagtgtgacgatgttcggttctcatggccgtgtacgcaccgaacagatggagaagggtgatgtcgggtatattccacaggggtatggccacagcatcgaaaatgttggagatcgtccttgtcgcgtcttgattggctttaacacaggtaactaccaagcgatcgacttatcacagtggattgcaggtaatcccgcggatgttcttgccacgaacttctccaaaccccgcagcctctttgaaaagttcccaaaacaggacgtgtttattgctcctggcaag

SEQ ID NO: 850 - protein, 359 aa, synthetic construct
  REGION 1..359: note = Variant of oxalate decarboxylase from Gemmata sp. SH-PL17
MGDPSFMNNVPDPLLSGKDLPTFKFALEKSKGKVIGGSSGKEATVVQLPISKGIAGVSMVLEPGAMRELHWHATAAEWGFVLWGHVRTTVIDPQGAAETNDFGPGDVWYFPRGHGHMLECLGDKPAHFILIFDNGYFSEFGTFSITDWIGHTPKALLAKNFKLPESAFDGFPKKEVYFARGAVPPATPAAPLQGLKLPPLTHKYELLEQEPHKVFKGGREWRVDSTRFPISKTVTGVVLDLEPGALRELHWHPNADEWQYVIDGNISVTMFGSHGRVRTEQMEKGDVGYIPQGYGHSIENVGDRPCRVLIGFNTGNYQAIDLSQWIAGNPADVLATNFSKPRSLFEKFPKQDVFIAPGK

SEQ ID NO: 851 - DNA, 1077 bp, synthetic construct
  misc_feature 1..1077: note = Variant of oxalate decarboxylase from Gemmata sp. SH-PL17
  source 1..1077: mol_type = other DNA
atgggtgaccctagctttatgaacaatgtaccagaccctctgctgtcgggcaaagatttgccgacgttcaagtttgagctggaaaagagcaagggcaaagtcattggggggagttcgggaaaagaagcaaccgttgtccagttacctatctccaaaggcattgctggtgtgagcatggtacttgaaccgggtgcgatgcgcgaattgcactggcatgccacagcagcagagtgggggttcgtattacgcggccacgtccgtacgacggtgatcgatccacaaggtgccgccgaaaccaacgactttggaccgggcgacgtgtggtattttcctcgcggtcatgggcacatgctggaatgcctgggcgataaaccggcgcatttcattctgatcttcgataacggctacttctcagagtttggcaccttctctattactgactggatcggtcacacaccgaaagcgcttctcgccaagaactttaagctgcccgaaagcgcttttgatgggtttcccaaaaaagaggtctattttgcacgtggcgcggttccaccagccacccctgcagcgcctttacagggactgaagctgccaccactcacgcataaatacgaactcctcgaacaagaacctcataaagtttttaaaggtggtcgtgaatggcgcgtggatagcactcgttttcccatttccaagactgtaaccggcgttgttcttgatttggaacccggcgcgttacgcgagcttcactggcatcctaatgctgacgagtggcaatatgtgatcgatggcaacattagtgtgacgatgttcggttctcatggccgtactcgcaccgaacagatggagaagggtgatgtcgggtatattccacaggggtatggccacagcatcgaaaatgttggagatcgtccttgtcgcgtcttgattggctttaacacaggtaactaccaagcgatcgacttatcacagtggattgcaggtaatcccgcggatgttcttgccacgaacttctccaaaccccgcagcctctttgaaaagttcccaaaacaggacgtgtttattgctcctggcaag

SEQ ID NO: 852 - protein, 359 aa, synthetic construct
  REGION 1..359: note = Variant of oxalate decarboxylase from Gemmata sp. SH-PL17
MGDPSFMNNVPDPLLSGKDLPTFKFELEKSKGKVIGGSSGKEATVVQLPISKGIAGVSMVLEPGAMRELHWHATAAEWGFVLRGHVRTTVIDPQGAAETNDFGPGDVWYFPRGHGHMLECLGDKPAHFILIFDNGYFSEFGTFSITDWIGHTPKALLAKNFKLPESAFDGFPKKEVYFARGAVPPATPAAPLQGLKLPPLTHKYELLEQEPHKVFKGGREWRVDSTRFPISKTVTGVVLDLEPGALRELHWHPNADEWQYVIDGNISVTMFGSHGRTRTEQMEKGDVGYIPQGYGHSIENVGDRPCRVLIGFNTGNYQAIDLSQWIAGNPADVLATNFSKPRSLFEKFPKQDVFIAPGK

SEQ ID NO: 853 - DNA, 1077 bp, synthetic construct
  misc_feature 1..1077: note = Variant of oxalate decarboxylase from Gemmata sp. SH-PL17
  source 1..1077: mol_type = other DNA
atgggtgaccctagctttatgaacaatgtaccagaccctctgctgtcgggcaaagatttgccgacgttcaagtttgcgctggaaaagagcaagggcaaagtcattggggggagttcgggaaaagaagcaaccgttgtccagttacctatctccaaaggcattgctggtgtgagcatggtacttgaaccgggtgcgatgcgcgaattgcactggcatgccacagcagcagagtgggggttcgtattatggggccacgtccgtacgacggtgatcgatccacaaggtgcggccgaaaccaacgactttggaccgggcgacgtgtggtattttcctcgcggtcatgggcacatgctggaatgcctgggcgataaaccggcgcatttcattctgatcttcgataacggctacttctcagagtttggcaccttctctattactgactggatcggtcacacaccgaaagcgcttctcgccaagaactttaagctgcccgaatcggcttttgatgggtttcccaaaaaagaggtctattttgcacgtggcgcggttccaccagccacccctgcagcgcctttacagggactgaagctgccaccactcacgcataaatacgaactcctcgaacaagaacctcataaagtttttaaaggtggtcgtgaatggcgcgtggatagcactcgttttcccatttccaagactgtaaccggcgttgttcttgatttggaacccggcgcgttacgcgagcttcactggcatcctaatgctgacgagtggcaatatgtgatcgatggcaacattagtgtgacgatgttcggttctcatggccgtactcgcaccgaacagatggagaagggtgatgtcgggtatattccacaggggtatggccacagcatcgaaaatgttggagatcgtccttgtcgcgtcttgattggctttaacacaggtaactaccaagcgatcgacttatcacagtggattgcaggtaatcccgcggatgttcttgccacgaacttctccaaaccccgcagcctctttgaaaagttcccaaaacaggacgtgtttattgctcctggcaag

SEQ ID NO: 854 - protein, 359 aa, synthetic construct
  REGION 1..359: note = Variant of oxalate decarboxylase from Gemmata sp. SH-PL17
MGDPSFMNNVPDPLLSGKDLPTFKFALEKSKGKVIGGSSGKEATVVQLPISKGIAGVSMVLEPGAMRELHWHATAAEWGFVLWGHVRTTVIDPQGAAETNDFGPGDVWYFPRGHGHMLECLGDKPAHFILIFDNGYFSEFGTFSITDWIGHTPKALLAKNFKLPESAFDGFPKKEVYFARGAVPPATPAAPLQGLKLPPLTHKYELLEQEPHKVFKGGREWRVDSTRFPISKTVTGVVLDLEPGALRELHWHPNADEWQYVIDGNISVTMFGSHGRTRTEQMEKGDVGYIPQGYGHSIENVGDRPCRVLIGFNTGNYQAIDLSQWIAGNPADVLATNFSKPRSLFEKFPKQDVFIAPGK

SEQ ID NO: 855 - DNA, 1077 bp, synthetic construct
  misc_feature 1..1077: note = Variant of oxalate decarboxylase from Gemmata sp. SH-PL17
  source 1..1077: mol_type = other DNA
atgggtgaccctagctttatgaacaatgtaccagaccctctgctgtcgggcaaagatttgccgacgttcaagtttgagctggaaaagagcaagggcaaagtcattggggggagttcgggaaaagaagcaaccgttgtccagttacctatctccaaaggcattgctggtgtgagcatggtacttgaaccgggtgcgatgcgcgaattgcactggcatgccacagcagcagagtgggggttcgtattacgcggccacgtccgtacgacggtgatcgatccacaaggtgcggccgaaaccaacgactttggaccgggcgacgtgtggtattttcctcgcggtcatgggcacatgctggaatgcctgggcgataaaccggcgcatttcattctgatcttcgataacggctacttctcagagtttggcaccttctctattactgactggatcggtcacacaccgaaagcgcttctcgccaagaactttaagctgcccgaatcggcttttgatgggtttcccaaaaaagaggtctattttgcacgtggcgcggttccaccagccacccctgcagcgcctttacagggactgaagctgccaccactcacgcataaatacgaactcctcgaacaagaacctcataaagtttttaaaggtggtcgtgaatggcgcgtggatagcactcgttttcccatttccaagactgtaaccggcgttgttcttgatttggaacccggcgcgttacgcgagcttcactggcatcctaatgctgacgagtggcaatatgtgatcgatggcaacattagtgtgacgatgttcggttctcatggccgtgtacgcaccgaacagatggagaagggtgatgtcgggtatattccacaggggtatggccacagcatcgaaaatgttggagatcgtccttgtcgcgtcttgattggctttaacacaggtaactaccaagcgatcgacttatcacagtggattgcaggtaatcccgcggatgttcttgccacgaacttctccaaacccaccagcctctttgaaaagttcccaaaacaggacgtgtttattgctcctggcaag

SEQ ID NO: 856 - protein, 359 aa, synthetic construct
  REGION 1..359: note = Variant of oxalate decarboxylase from Gemmata sp. SH-PL17
MGDPSFMNNVPDPLLSGKDLPTFKFELEKSKGKVIGGSSGKEATVVQLPISKGIAGVSMVLEPGAMRELHWHATAAEWGFVLRGHVRTTVIDPQGAAETNDFGPGDVWYFPRGHGHMLECLGDKPAHFILIFDNGYFSEFGTFSITDWIGHTPKALLAKNFKLPESAFDGFPKKEVYFARGAVPPATPAAPLQGLKLPPLTHKYELLEQEPHKVFKGGREWRVDSTRFPISKTVTGVVLDLEPGALRELHWHPNADEWQYVIDGNISVTMFGSHGRVRTEQMEKGDVGYIPQGYGHSIENVGDRPCRVLIGFNTGNYQAIDLSQWIAGNPADVLATNFSKPTSLFEKFPKQDVFIAPGK

SEQ ID NO: 857 - DNA, 1077 bp, synthetic construct
  misc_feature 1..1077: note = Variant of oxalate decarboxylase from Gemmata sp. SH-PL17
  source 1..1077: mol_type = other DNA
atgggtgaccctacctttatgaacaatgtaccagaccctctgctgtcgggcaaagatttgccgacgttcaagtttgcgctggaaaagagcaagggcaaagtcattggggggagttcgggaaaagaagcaaccgttgtccagttacctatctccaaaggcattgctggtgtgagcatggtacttgaaccgggtgcgatgcgcgaattgcactggcatgccacagcagcagagtgggggttcgtattaaccggccacgtccgtacgacggtgatcgatccacaaggtgccgccgaaaccaacgactttggaccgggcgacgtgtggtattttcctcgcggtcatgggcacatgctggaatgcctgggcgataaaccggcgcatttcattctgatcttcgataacggctacttctcagagtttggcaccttctctattactgactggatcggtcacacaccgaaagcgcttctcgccaagaactttaagctgcccgaaagcgcttttgatgggtttcccaaaaaagaggtctattttgcacgtggcgcggttccaccagccacccctgcagcgcctttacagggactgaagctgccaccactcacgcataaatacgaactcctcgaacaagaacctcataaagtttttaaaggtggtcgtgaatggcgcgtggatagcactcgttttcccatttccaagactgtaaccggcgttgttcttgatttggaacccggcgcgttacgcgagcttcactggcatcctaatgctgacgagtggcaatatgtgatcgatggcaacattagtgtgacgatgttcggttctcatggccgtactcgcaccgaacagatggagaagggtgatgtcgggtatattccacaggggtatggccacagcatcgaaaatgttggagatcgtccttgtcgcgtcttgattggctttaacacaggtaactaccaagcgatcgacttatcacagtggattgcaggtaatcccgcggatgttcttgccacgaacttctccaaacccaccagcctctttgaaaagttcccaaaacaggacgtgtttattgctcctggcaag

SEQ ID NO: 858 - protein, 359 aa, synthetic construct
  REGION 1..359: note = Variant of oxalate decarboxylase from Gemmata sp. SH-PL17
MGDPTFMNNVPDPLLSGKDLPTFKFALEKSKGKVIGGSSGKEATVVQLPISKGIAGVSMVLEPGAMRELHWHATAAEWGFVLTGHVRTTVIDPQGAAETNDFGPGDVWYFPRGHGHMLECLGDKPAHFILIFDNGYFSEFGTFSITDWIGHTPKALLAKNFKLPESAFDGFPKKEVYFARGAVPPATPAAPLQGLKLPPLTHKYELLEQEPHKVFKGGREWRVDSTRFPISKTVTGVVLDLEPGALRELHWHPNADEWQYVIDGNISVTMFGSHGRTRTEQMEKGDVGYIPQGYGHSIENVGDRPCRVLIGFNTGNYQAIDLSQWIAGNPADVLATNFSKPTSLFEKFPKQDVFIAPGK

SEQ ID NO: 859 - DNA, 1077 bp, synthetic construct
  misc_feature 1..1077: note = Variant of oxalate decarboxylase from Gemmata sp. SH-PL17
  source 1..1077: mol_type = other DNA
atgggtgaccctacctttatgaacaatgtaccagaccctctgctgtcgggcaaagatttgccgacgttcaagtttgagctggaaaagagcaagggcaaagtcattggggggagttcgggaaaagaagcaaccgttgtccagttacctatctccaaaggcattgctggtgtgagcatggtacttgaaccgggtgcgatgcgcgaattgcactggcatgccacagcagcagagtgggggttcgtattatggggccacgtccgtacgacggtgatcgatccacaaggtgcggccgaaaccaacgactttggaccgggcgacgtgtggtattttcctcgcggtcatgggcacatgctggaatgcctgggcgataaaccggcgcatttcattctgatcttcgataacggctacttctcagagtttggcaccttctctattactgactggatcggtcacacaccgaaagcgcttctcgccaagaactttaagctgcccgaaagcgcttttgatgggtttcccaaaaaagaggtctattttgcacgtggcgcggttccaccagccacccctgcagcgcctttacagggactgaagctgccaccactcacgcataaatacgaactcctcgaacaagaacctcataaagtttttaaaggtggtcgtgaatggcgcgtggatagcactcgttttcccatttccaagactgtaaccggcgttgttcttgatttggaacccggcgcgttacgcgagcttcactggcatcctaatgctgacgagtggcaatatgtgatcgatggcaacattagtgtgacgatgttcggttctcatggccgtactcgcaccgaacagatggagaagggtgatgtcgggtatattccacaggggtatggccacagcatcgaaaatgttggagatcgtccttgtcgcgtcttgattggctttaacacaggtaactaccaagcgatcgacttatcacagtggattgcaggtaatcccgcggatgttcttgccacgaacttctccaaacccaccagcctctttgaaaagttcccaaaacaggacgtgtttattgctcctggcaag

SEQ ID NO: 860 - protein, 359 aa, synthetic construct
  REGION 1..359: note = Variant of oxalate decarboxylase from Gemmata sp. SH-PL17
MGDPTFMNNVPDPLLSGKDLPTFKFELEKSKGKVIGGSSGKEATVVQLPISKGIAGVSMVLEPGAMRELHWHATAAEWGFVLWGHVRTTVIDPQGAAETNDFGPGDVWYFPRGHGHMLECLGDKPAHFILIFDNGYFSEFGTFSITDWIGHTPKALLAKNFKLPESAFDGFPKKEVYFARGAVPPATPAAPLQGLKLPPLTHKYELLEQEPHKVFKGGREWRVDSTRFPISKTVTGVVLDLEPGALRELHWHPNADEWQYVIDGNISVTMFGSHGRTRTEQMEKGDVGYIPQGYGHSIENVGDRPCRVLIGFNTGNYQAIDLSQWIAGNPADVLATNFSKPTSLFEKFPKQDVFIAPGK

SEQ ID NO: 861 - DNA, 1077 bp, synthetic construct
  misc_feature 1..1077: note = Variant of oxalate decarboxylase from Gemmata sp. SH-PL17
  source 1..1077: mol_type = other DNA
atgggtgaccctagctttatgaacaatgtaccagaccctctgctgtcgggcaaagatttgccgacgttcaagtttgagctggaaaagagcaagggcaaagtcgttggggggagttcgggaaaagaagcaaccgttgtccagttacctatctccaaaggcattgctggtgtgagcatggtacttgaaccgggtgcgatgcgcgaattgcactggcatgccacagcagcagagtgggggttcgtattaaccggccacgtccgtacgacggtgatcgatccacaaggtgccgccgaaaccaacgactttggaccgggcgacgtgtggtattttcctcgcggtcatgggcacatgctggaatgcctgggcgataaaccggcgcatttcattctgatcttcgataacggctacttctcagagtttggcaccttctctattactgactggatcggtcacacaccgaaagcgcttctcgccaagaactttaagctgcccgaatcggcttttgatgggtttcccaaaaaagaggtctattttgcacgtggcgcggttccaccagccacccctgcagcgcctttacagggactgaagctgccaccactcacgcataaatacgaactcctcgaacaagaacctcataaagtttttaaaggtggtcgtgaatggcgcgtggatagcactcgttttcccatttccaagactgtaaccggcgttgttcttgatttggaacccggcgcgttacgcgagcttcactggcatcctaatgctgacgagtggcaatatgtgatcgatggcaacattagtgtgacgatgttcggttctcatggccgtactcgcaccgaacagatggagaagggtgatgtcgggtatattccacaggggtatggccacagcatcgaaaatgttggagatcgtccttgtcgcgtcttgattggctttaacacaggtaactaccaagcgatcgacttatcacagtggattgcaggtaatcccgcggatgttcttgccacgaacttctccaaacccaccagcctctttgaaaagttcccaaaacaggacgtgtttattgctcctggcaag

SEQ ID NO: 862 - protein, 359 aa, synthetic construct
  REGION 1..359: note = Variant of oxalate decarboxylase from Gemmata sp. SH-PL17
MGDPSFMNNVPDPLLSGKDLPTFKFELEKSKGKVVGGSSGKEATVVQLPISKGIAGVSMVLEPGAMRELHWHATAAEWGFVLTGHVRTTVIDPQGAAETNDFGPGDVWYFPRGHGHMLECLGDKPAHFILIFDNGYFSEFGTFSITDWIGHTPKALLAKNFKLPESAFDGFPKKEVYFARGAVPPATPAAPLQGLKLPPLTHKYELLEQEPHKVFKGGREWRVDSTRFPISKTVTGVVLDLEPGALRELHWHPNADEWQYVIDGNISVTMFGSHGRTRTEQMEKGDVGYIPQGYGHSIENVGDRPCRVLIGFNTGNYQAIDLSQWIAGNPADVLATNFSKPTSLFEKFPKQDVFIAPGK

SEQ ID NO: 863 - DNA, 1077 bp, synthetic construct
  misc_feature 1..1077: note = Variant of oxalate decarboxylase from Gemmata sp. SH-PL17
  source 1..1077: mol_type = other DNA
atgggtgaccctagctttatgaacaatgtaccagaccctctgctgtcgggcaaagatttgccgacgttcaagtttgcgctggaaaagagcaagggcaaagtcattggggggagttcgggaaaagaagcaaccgttgtccagttacctatctccaaaggcattgctggtgtgagcatggtacttgaaccgggtgcgatgcgcgaattgcactggcatgccacagcagcagagtgggggttcgtattacgcggccacgtccgtacgacggtgatcgatccacaaggtcgcgccgaaaccaacgactttggaccgggcgacgtgtggtattttcctcgcggtcatgggcacatgctggaatgcctgggcgataaaccggcgcatttcattctgatcttcgataacggctacttctcagagtttggcaccttctctattactgactggatcggtcacacaccgaaagcgcttctcgccaagaactttaagctgcccgaatcggcttttgatgggtttcccaaaaaagaggtctattttgcacgtggcgcggttccaccagccacccctgcagcgcctttacagggactgaagctgccaccactcacgcataaatacgaactcctcgaacaagaacctcataaagtttttaaaggtggtcgtgaatggcgcgtggatagcactcgttttcccatttccaagactgtaaccggcgttgttcttgatttggaacccggcgcgttacgcgagcttcactggcatcctaatgctgacgagtggcaatatgtgatcgatggcaacattagtgtgacgatgttcggttctcatggccgtgtacgcaccgaacagatggagaagggtgatgtcgggtatattccacaggggtatggccacagcatcgaaaatgttggagatcgtccttgtcgcgtcttgattggctttaacacaggtaactaccaagcgatcgacttatcacagtggattgcaggtaatcccgcggatgttcttgccacgaacttctccaaacccaccagcctctttgaaaagttcccaaaacaggacgtgtttattgctcctggcaag

SEQ ID NO: 864 - protein, 359 aa, synthetic construct
  REGION 1..359: note = Variant of oxalate decarboxylase from Gemmata sp. SH-PL17
MGDPSFMNNVPDPLLSGKDLPTFKFALEKSKGKVIGGSSGKEATVVQLPISKGIAGVSMVLEPGAMRELHWHATAAEWGFVLRGHVRTTVIDPQGRAETNDFGPGDVWYFPRGHGHMLECLGDKPAHFILIFDNGYFSEFGTFSITDWIGHTPKALLAKNFKLPESAFDGFPKKEVYFARGAVPPATPAAPLQGLKLPPLTHKYELLEQEPHKVFKGGREWRVDSTRFPISKTVTGVVLDLEPGALRELHWHPNADEWQYVIDGNISVTMFGSHGRVRTEQMEKGDVGYIPQGYGHSIENVGDRPCRVLIGFNTGNYQAIDLSQWIAGNPADVLATNFSKPTSLFEKFPKQDVFIAPGK

SEQ ID NO: 865 - DNA, 1077 bp, synthetic construct
  misc_feature 1..1077: note = Variant of oxalate decarboxylase from Gemmata sp. SH-PL17
  source 1..1077: mol_type = other DNA
atgggtgaccctagctttatgaacaatgtaccagaccctctgctgtcgggcaaagatttgccgacgttcaagtttgcgctggaaaagagcaagggcaaagtcattggggggagttcgggaaaagaagcaaccgttgtccagttacctatctccaaaggcattgctggtgtgagcatggtacttgaaccgggtgcgatgcgcgaattgcactggcatgccacagcagcagagtgggggttcgtattaaccggccacgtccgtacgacggtgatcgatccacaaggtctggccgaaaccaacgactttggaccgggcgacgtgtggtattttcctcgcggtcatgggcacatgctggaatgcctgggcgataaaccggcgcatttcattctgatcttcgataacggctacttctcagagtttggcaccttctctattactgactggatcggtcacacaccgaaagcgcttctcgccaagaactttaagctgcccgaatcggcttttgatgggtttcccaaaaaagaggtctattttgcacgtggcgcggttccaccagccacccctgcagcgcctttacagggactgaagctgccaccactcacgcataaatacgaactcctcgaacaagaacctcataaagtttttaaaggtggtcgtgaatggcgcgtggatagcactcgttttcccatttccaagactgtaaccggcgttgttcttgatttggaacccggcgcgttacgcgagcttcactggcatcctaatgctgacgagtggcaatatgtgatcgatggcaacattagtgtgacgatgttcggttctcatggccgtactcgcaccgaacagatggagaagggtgatgtcgggtatattccacaggggtatggccacagcatcgaaaatgttggagatcgtccttgtcgcgtcttgattggctttaacacaggtaactaccaagcgatcgacttatcacagtggattgcaggtaatcccgcggatgttcttgccacgaacttctccaaacccaccagcctctttgaaaagttcccaaaacaggacgtgtttattgctcctggcaag

SEQ ID NO: 866 - protein, 359 aa, synthetic construct
  REGION 1..359: note = Variant of oxalate decarboxylase from Gemmata sp. SH-PL17
MGDPSFMNNVPDPLLSGKDLPTFKFALEKSKGKVIGGSSGKEATVVQLPISKGIAGVSMVLEPGAMRELHWHATAAEWGFVLTGHVRTTVIDPQGLAETNDFGPGDVWYFPRGHGHMLECLGDKPAHFILIFDNGYFSEFGTFSITDWIGHTPKALLAKNFKLPESAFDGFPKKEVYFARGAVPPATPAAPLQGLKLPPLTHKYELLEQEPHKVFKGGREWRVDSTRFPISKTVTGVVLDLEPGALRELHWHPNADEWQYVIDGNISVTMFGSHGRTRTEQMEKGDVGYIPQGYGHSIENVGDRPCRVLIGFNTGNYQAIDLSQWIAGNPADVLATNFSKPTSLFEKFPKQDVFIAPGK

SEQ ID NO: 867 - DNA, 1077 bp, synthetic construct
  misc_feature 1..1077: note = Variant of oxalate decarboxylase from Gemmata sp. SH-PL17
  source 1..1077: mol_type = other DNA
atgggtgaccctagctttatgaacaatgtaccagaccctctgctgtcgggcaaagatttgccgacgttcaagtttgagctggaaaagagcaagggcaaagtcattggggggagttcgggaaaagaagcaaccgttgtccagttacctatctccaaaggcattgctggtgtgagcatggtacttgaaccgggtgcgatgcgcgaattgcactggcatgccacagcagcagagtgggggttcgtattaaccggccacgtccgtacgacggtgatcgatccacaaggtgcggccgaaaccaacgactttggaccgggcgacgtgtggtattttcctcgcggtcatgggcacatgctggaatgcctgggcgataaaccggcgcatttcattctgatcttcgataacggctacttctcagagtttggcaccttctctattactgactggatcggtcacacaccgaaagcgcttctcgccaagaactttaagctgcccgaatcggcttttgatgggtttcccaaaaaagaggtctattttgcacgtggcgcggttccaccagccacccctgcagcgcctttacagggactgaagctgccaccactcacgcataaatacgaactcctcgaacaagaacctcataaagtttttaaaggtggtcgtgaatggcgcgtggatagcactcgttttcccatttccaagactgtaaccggcgttgttcttgatttggaacccggcgcgttacgcgagcttcactggcatcctaatgctgacgagtggcaatatgtgatcgatggcaacattagtgtgacgatgttcggttctcatggccgtactcgcaccgaacagatggagaagggtgatgtcgggtatattccacaggggtatggccacagcatcgaaaatgttggagatcgtccttgtcgcgtcttgattggctttaacacaggtaactaccaagcgatcgacttatcacagtggattgcaggtaatcccgcggatgttcttgccacgaacttctccaaacccaccagcctctttgaaaagttcccaaaacaggacgtgtttattgctcctggcaag

SEQ ID NO: 868 - protein, 359 aa, synthetic construct
  REGION 1..359: note = Variant of oxalate decarboxylase from Gemmata sp. SH-PL17
MGDPSFMNNVPDPLLSGKDLPTFKFELEKSKGKVIGGSSGKEATVVQLPISKGIAGVSMVLEPGAMRELHWHATAAEWGFVLTGHVRTTVIDPQGAAETNDFGPGDVWYFPRGHGHMLECLGDKPAHFILIFDNGYFSEFGTFSITDWIGHTPKALLAKNFKLPESAFDGFPKKEVYFARGAVPPATPAAPLQGLKLPPLTHKYELLEQEPHKVFKGGREWRVDSTRFPISKTVTGVVLDLEPGALRELHWHPNADEWQYVIDGNISVTMFGSHGRTRTEQMEKGDVGYIPQGYGHSIENVGDRPCRVLIGFNTGNYQAIDLSQWIAGNPADVLATNFSKPTSLFEKFPKQDVFIAPGK

SEQ ID NO: 869 - DNA, 1077 bp, synthetic construct
  misc_feature 1..1077: note = Variant of oxalate decarboxylase from Gemmata sp. SH-PL17
  source 1..1077: mol_type = other DNA
atgggtgaccctagctttatgaacaatgtaccagaccctctgctgtcgggcaaagatttgccgacgttcaagtttgcgctggaaaagagcaagggcaaagtcattggggggagttcgggaaaagaagcaaccgttgtccagttacctatctccaaaggcattgctggtgtgagcatggtacttgaaccgggtgcgatgcgcgaattgcactggcatgccacagcagcagagtgggggttcgtattacgcggccacgtccgtacgacggtgatcgatccacaaggtgccgccgaaaccaacgactttggaccgggcgacgtgtggtattttcctcgcggtcatgggcacatgctggaatgcctgggcgataaaccggcgcatttcattctgatcttcgataacggctacttctcagagtttggcaccttctctattactgactggatcggtcacacaccgaaagcgcttctcgccaagaactttaagctgcccgaatcggcttttgatgggtttcccaaaaaagaggtctattttgcacgtggcgcggttccaccagccacccctgcagcgcctttacagggactgaagctgccaccactcacgcataaatacgaactcctcgaacaagaacctcataaagtttttaaaggtggtcgtgaatggcgcgtggatagcactcgttttcccatttccaagactgtaaccggcgttgttcttgatttggaacccggcgcgttacgcgagcttcactggcatcctaatgctgacgagtggcaatatgtgatcgatggcaacattagtgtgacgatgttcggttctcatggccgtactcgcaccgaacagatggagaagggtgatgtcgggtatattccacaggggtatggccacagcatcgaaaatgttggagatcgtccttgtcgcgtcttgattggctttaacacaggtaactaccaagcgatcgacttatcacagtggattgcaggtaatcccgcggatgttcttgccacgaacttctccaaacccaccagcctctttgaaaagttcccaaaacaggacgtgtttattgctcctggcaag

SEQ ID NO: 870 - protein, 359 aa, synthetic construct
  REGION 1..359: note = Variant of oxalate decarboxylase from Gemmata sp. SH-PL17
MGDPSFMNNVPDPLLSGKDLPTFKFALEKSKGKVIGGSSGKEATVVQLPISKGIAGVSMVLEPGAMRELHWHATAAEWGFVLRGHVRTTVIDPQGAAETNDFGPGDVWYFPRGHGHMLECLGDKPAHFILIFDNGYFSEFGTFSITDWIGHTPKALLAKNFKLPESAFDGFPKKEVYFARGAVPPATPAAPLQGLKLPPLTHKYELLEQEPHKVFKGGREWRVDSTRFPISKTVTGVVLDLEPGALRELHWHPNADEWQYVIDGNISVTMFGSHGRTRTEQMEKGDVGYIPQGYGHSIENVGDRPCRVLIGFNTGNYQAIDLSQWIAGNPADVLATNFSKPTSLFEKFPKQDVFIAPGK

SEQ ID NO: 871 - DNA, 1077 bp, synthetic construct
  misc_feature 1..1077: note = Variant of oxalate decarboxylase from Gemmata sp. SH-PL17
  source 1..1077: mol_type = other DNA
atgggtgaccctagctttatgaacaatgtaccagaccctctgctgtcgggcaaagatttgccgacgttcaagtttgagctggaaaagagcaagggcaaagtcattggggggagttcgggaaaagaagcaaccgttgtccagttacctatctccaaaggcattgctggtgtgagcatggtacttgaaccgggtgcgatgcgcgaattgcactggcatgccacagcagcagagtgggggttcgtattacgcggccacgtccgtacgacggtgatcgatccacaaggtgccgccgaaaccaacgactttggaccgggcgacgtgtggtattttcctcgcggtcatgggcacatgctggaatgcctgggcgataaaccggcgcatttcattctgatcttcgataacggctacttctcagagtttggcaccttctctattactgactggatcggtcacacaccgaaagcgcttctcgccaagaactttaagctgcccgaaagcgcttttgatgggtttcccaaaaaagaggtctattttgcacgtggcgcggttccaccagccacccctgcagcgcctttacagggactgaagctgccaccactcacgcataaatacgaactcctcgaacaagaacctcataaagtttttaaaggtggtcgtgaatggcgcgtggatagcactcgttttcccatttccaagactgtaaccggcgttgttcttgatttggaacccggcgcgttacgcgagcttcactggcatcctaatgctgacgagtggcaatatgtgatcgatggcaacattagtgtgacgatgttcggttctcatggccgtactcgcaccgaacagatggagaagggtgatgtcgggtatattccacaggggtatggccacagcatcgaaaatgttggagatcgtccttgtcgcgtcttgattggctttaacacaggtaactaccaagcgatcgacttatcacagtggattgcaggtaatcccgcggatgttcttgccacgaacttctccaaacccaccagcctctttgaaaagttcccaaaacaggacgtgtttattgctcctggcaag

SEQ ID NO: 872 - protein, 359 aa, synthetic construct
  REGION 1..359: note = Variant of oxalate decarboxylase from Gemmata sp. SH-PL17
MGDPSFMNNVPDPLLSGKDLPTFKFELEKSKGKVIGGSSGKEATVVQLPISKGIAGVSMVLEPGAMRELHWHATAAEWGFVLRGHVRTTVIDPQGAAETNDFGPGDVWYFPRGHGHMLECLGDKPAHFILIFDNGYFSEFGTFSITDWIGHTPKALLAKNFKLPESAFDGFPKKEVYFARGAVPPATPAAPLQGLKLPPLTHKYELLEQEPHKVFKGGREWRVDSTRFPISKTVTGVVLDLEPGALRELHWHPNADEWQYVIDGNISVTMFGSHGRTRTEQMEKGDVGYIPQGYGHSIENVGDRPCRVLIGFNTGNYQAIDLSQWIAGNPADVLATNFSKPTSLFEKFPKQDVFIAPGK

SEQ ID NO: 873 - DNA, 1077 bp, synthetic construct
  misc_feature 1..1077: note = Variant of oxalate decarboxylase from Gemmata sp. SH-PL17
  source 1..1077: mol_type = other DNA
atgggtgaccctacctttatgaacaatgtaccagaccctctgctgtcgggcaaagatttgccgacgttcaagtttgcgctggaaaagagcaagggcaaagtcattggggggagttcgggaaaagaagcaaccgttgtccagttacctatctccaaaggcattgctggtgtgagcatggtacttgaaccgggtgcgatgcgcgaattgcactggcatgccacagcagcagagtgggggttcgtattacgcggccacgtccgtacgacggtgatcgatccacaaggtgcggccgaaaccaacgactttggaccgggcgacgtgtggtattttcctcgcggtcatgggcacatgctggaatgcctgggcgataaaccggcgcatttcattctgatcttcgataacggctacttctcagagtttggcaccttctctattactgactggatcggtcacacaccgaaagcgcttctcgccaagaactttaagctgcccgaatcggcttttgatgggtttcccaaaaaagaggtctattttgcacgtggcgcggttccaccagccacccctgcagcgcctttacagggactgaagctgccaccactcacgcataaatacgaactcctcgaacaagaacctcataaagtttttaaaggtggtcgtgaatggcgcgtggatagcactcgttttcccatttccaagactgtaaccggcgttgttcttgatttggaacccggcgcgttacgcgagcttcactggcatcctaatgctgacgagtggcaatatgtgatcgatggcaacattagtgtgacgatgttcggttctcatggccgtgtacgcaccgaacagatggagaagggtgatgtcgggtatattccacaggggtatggccacagcatcgaaaatgttggagatcgtccttgtcgcgtcttgattggctttaacacaggtaactaccaagcgatcgacttatcacagtggattgcaggtaatcccgcggatgttcttgccacgaacttctccaaacccaccagcctctttgaaaagttcccaaaacaggacgtgtttattgctcctggcaag

SEQ ID NO: 874 - protein, 359 aa, synthetic construct
  REGION 1..359: note = Variant of oxalate decarboxylase from Gemmata sp. SH-PL17
MGDPTFMNNVPDPLLSGKDLPTFKFALEKSKGKVIGGSSGKEATVVQLPISKGIAGVSMVLEPGAMRELHWHATAAEWGFVLRGHVRTTVIDPQGAAETNDFGPGDVWYFPRGHGHMLECLGDKPAHFILIFDNGYFSEFGTFSITDWIGHTPKALLAKNFKLPESAFDGFPKKEVYFARGAVPPATPAAPLQGLKLPPLTHKYELLEQEPHKVFKGGREWRVDSTRFPISKTVTGVVLDLEPGALRELHWHPNADEWQYVIDGNISVTMFGSHGRVRTEQMEKGDVGYIPQGYGHSIENVGDRPCRVLIGFNTGNYQAIDLSQWIAGNPADVLATNFSKPTSLFEKFPKQDVFIAPGK

SEQ ID NO: 875 - DNA, 1077 bp, synthetic construct
  misc_feature 1..1077: note = Variant of oxalate decarboxylase from Gemmata sp. SH-PL17
  source 1..1077: mol_type = other DNA
atgggtgaccctagctttatgaacaatgtaccagaccctctgctgtcgggcaaagatttgccgacgttcaagtttgcgctggaaaagagcaagggcaaagtcattggggggagttcgggaaaagaagcaaccgttgtccagttacctatctccaaaggcattgctggtgtgagcatggtacttgaaccgggtgcgatgcgcgaattgcactggcatgccacagcagcagagtgggggttcgtattaaccggccacgtccgtacgacggtgatcgatccacaaggtgcggccgaaaccaacgactttggaccgggcgacgtgtggtattttcctcgcggtcatgggcacatgctggaatgcctgggcgataaaccggcgcatttcattctgatcttcgataacggctacttctcagagtttggcaccttctctattactgactggatcggtcacacaccgaaagcgcttctcgccaagaactttaagctgcccgaaagcgcttttgatgggtttcccaaaaaagaggtctattttgcacgtggcgcggttccaccagccacccctgcagcgcctttacagggactgaagctgccaccactcacgcataaatacgaactcctcgaacaagaacctcataaagtttttaaaggtggtcgtgaatggcgcgtggatagcactcgttttcccatttccaagactgtaaccggcgttgttcttgatttggaacccggcgcgttacgcgagcttcactggcatcctaatgctgacgagtggcaatatgtgatcgatggcaacattagtgtgacgatgttcggttctcatggccgtgtacgcaccgaacagatggagaagggtgatgtcgggtatattccacaggggtatggccacagcatcgaaaatgttggagatcgtccttgtcgcgtcttgattggctttaacacaggtaactaccaagcgatcgacttatcacagtggattgcaggtaatcccgcggatgttcttgccacgaacttctccaaacccaccagcctctttgaaaagttcccaaaacaggacgtgtttattgctcctggcaag

SEQ ID NO: 876 - protein, 359 aa, synthetic construct
  REGION 1..359: note = Variant of oxalate decarboxylase from Gemmata sp. SH-PL17
MGDPSFMNNVPDPLLSGKDLPTFKFALEKSKGKVIGGSSGKEATVVQLPISKGIAGVSMVLEPGAMRELHWHATAAEWGFVLTGHVRTTVIDPQGAAETNDFGPGDVWYFPRGHGHMLECLGDKPAHFILIFDNGYFSEFGTFSITDWIGHTPKALLAKNFKLPESAFDGFPKKEVYFARGAVPPATPAAPLQGLKLPPLTHKYELLEQEPHKVFKGGREWRVDSTRFPISKTVTGVVLDLEPGALRELHWHPNADEWQYVIDGNISVTMFGSHGRVRTEQMEKGDVGYIPQGYGHSIENVGDRPCRVLIGFNTGNYQAIDLSQWIAGNPADVLATNFSKPTSLFEKFPKQDVFIAPGK

SEQ ID NO: 877 - DNA, 1077 bp, synthetic construct
  misc_feature 1..1077: note = Variant of oxalate decarboxylase from Gemmata sp. SH-PL17
  source 1..1077: mol_type = other DNA
atgggtgaccctagctttatgaacaatgtaccagaccctctgctgtcgggcaaagatttgccgacgttcaagtttgagctggaaaagagcaagggcaaagtcattggggggagttcgggaaaagaagcaaccgttgtccagttacctatctccaaaggcattgctggtgtgagcatggtacttgaaccgggtgcgatgcgcgaattgcactggcatgccacagcagcagagtgggggttcgtattaaccggccacgtccgtacgacggtgatcgatccacaaggtgcggccgaaaccaacgactttggaccgggcgacgtgtggtattttcctcgcggtcatgggcacatgctggaatgcctgggcgataaaccggcgcatttcattctgatcttcgataacggctacttctcagagtttggcaccttctctattactgactggatcggtcacacaccgaaagcgcttctcgccaagaactttaagctgcccgaacgcgcttttgatgggtttcccaaaaaagaggtctattttgcacgtggcgcggttccaccagccacccctgcagcgcctttacagggactgaagctgccaccactcacgcataaatacgaactcctcgaacaagaacctcataaagtttttaaaggtggtcgtgaatggcgcgtggatagcactcgttttcccatttccaagactgtaaccggcgttgttcttgatttggaacccggcgcgttacgcgagcttcactggcatcctaatgctgacgagtggcaatatgtgatcgatggcaacattagtgtgacgatgttcggttctcatggccgtactcgcaccgaacagatggagaagggtgatgtcgggtatattccacaggggtatggccacagcatcgaaaatgttggagatcgtccttgtcgcgtcttgattggctttaacacaggtaactaccaagcgatcgacttatcacagtggattgcaggtaatcccgcggatgttcttgccacgaacttctccaaacccaccagcctctttgaaaagttcccaaaacaggacgtgtttattgctcctggcaag

SEQ ID NO: 878 - protein, 359 aa, synthetic construct
  REGION 1..359: note = Variant of oxalate decarboxylase from Gemmata sp. SH-PL17
MGDPSFMNNVPDPLLSGKDLPTFKFELEKSKGKVIGGSSGKEATVVQLPISKGIAGVSMVLEPGAMRELHWHATAAEWGFVLTGHVRTTVIDPQGAAETNDFGPGDVWYFPRGHGHMLECLGDKPAHFILIFDNGYFSEFGTFSITDWIGHTPKALLAKNFKLPERAFDGFPKKEVYFARGAVPPATPAAPLQGLKLPPLTHKYELLEQEPHKVFKGGREWRVDSTRFPISKTVTGVVLDLEPGALRELHWHPNADEWQYVIDGNISVTMFGSHGRTRTEQMEKGDVGYIPQGYGHSIENVGDRPCRVLIGFNTGNYQAIDLSQWIAGNPADVLATNFSKPTSLFEKFPKQDVFIAPGK

SEQ ID NO: 879 - DNA, 1077 bp, synthetic construct
  misc_feature 1..1077: note = Variant of oxalate decarboxylase from Gemmata sp. SH-PL17
  source 1..1077: mol_type = other DNA
atgggtgaccctacctttatgaacaatgtaccagaccctctgctgtcgggcaaagatttgccgacgttcaagtttgcgctggaaaagagcaagggcaaagtcattggggggagttcgggaaaagaagcaaccgttgtccagttacctatctccaaaggcattgctggtgtgagcatggtacttgaaccgggtgcgatgcgcgaattgcactggcatgccacagcagcagagtgggggttcgtattatggggccacgtccgtacgacggtgatcgatccacaaggtgccgccgaaaccaacgactttggaccgggcgacgtgtggtattttcctcgcggtcatgggcacatgctggaatgcctgggcgataaaccggcgcatttcattctgatcttcgataacggctacttctcagagtttggcaccttctctattactgactggatcggtcacacaccgaaagcgcttctcgccaagaactttaagctgcccgaatcggcttttgatgggtttcccaaaaaagaggtctattttgcacgtggcgcggttccaccagccacccctgcagcgcctttacagggactgaagctgccaccactcacgcataaatacgaactcctcgaacaagaacctcataaagtttttaaaggtggtcgtgaatggcgcgtggatagcactcgttttcccatttccaagactgtaaccggcgttgttcttgatttggaacccggcgcgttacgcgagcttcactggcatcctaatgctgacgagtggcaatatgtgatcgatggcaacattagtgtgacgatgttcggttctcatggccgtgtacgcaccgaacagatggagaagggtgatgtcgggtatattccacaggggtatggccacagcatcgaaaatgttggagatcgtccttgtcgcgtcttgattggctttaacacaggtaactaccaagcgatcgacttatcacagtggattgcaggtaatcccgcggatgttcttgccacgaacttctccaaacccaccagcctctttgaaaagttcccaaaacaggacgtgtttattgctcctggcaag

SEQ ID NO: 880 - protein, 359 aa, synthetic construct
  REGION 1..359: note = Variant of oxalate decarboxylase from Gemmata sp. SH-PL17
MGDPTFMNNVPDPLLSGKDLPTFKFALEKSKGKVIGGSSGKEATVVQLPISKGIAGVSMVLEPGAMRELHWHATAAEWGFVLWGHVRTTVIDPQGAAETNDFGPGDVWYFPRGHGHMLECLGDKPAHFILIFDNGYFSEFGTFSITDWIGHTPKALLAKNFKLPESAFDGFPKKEVYFARGAVPPATPAAPLQGLKLPPLTHKYELLEQEPHKVFKGGREWRVDSTRFPISKTVTGVVLDLEPGALRELHWHPNADEWQYVIDGNISVTMFGSHGRVRTEQMEKGDVGYIPQGYGHSIENVGDRPCRVLIGFNTGNYQAIDLSQWIAGNPADVLATNFSKPTSLFEKFPKQDVFIAPGK

SEQ ID NO: 881 - DNA, 1077 bp, synthetic construct
  misc_feature 1..1077: note = Variant of oxalate decarboxylase from Gemmata sp. SH-PL17
  source 1..1077: mol_type = other DNA
atgggtgaccctacctttatgaacaatgtaccagaccctctgctgtcgggcaaagatttgccgacgttcaagtttgcgctggaaaagagcaagggcaaagtcattggggggagttcgggaaaagaagcaaccgttgtccagttacctatctccaaaggcattgctggtgtgagcatggtacttgaaccgggtgcgatgcgcgaattgcactggcatgccacagcagcagagtgggggttcgtattatggggccacgtccgtacgacggtgatcgatccacaaggtctggccgaaaccaacgactttggaccgggcgacgtgtggtattttcctcgcggtcatgggcacatgctggaatgcctgggcgataaaccggcgcatttcattctgatcttcgataacggctacttctcagagtttggcaccttctctattactgactggatcggtcacacaccgaaagcgcttctcgccaagaactttaagctgcccgaaagcgcttttgatgggtttcccaaaaaagaggtctattttgcacgtggcgcggttccaccagccacccctgcagcgcctttacagggactgaagctgccaccactcacgcataaatacgaactcctcgaacaagaacctcataaagtttttaaaggtggtcgtgaatggcgcgtggatagcactcgttttcccatttccaagactgtaaccggcgttgttcttgatttggaacccggcgcgttacgcgagcttcactggcatcctaatgctgacgagtggcaatatgtgatcgatggcaacattagtgtgacgatgttcggttctcatggccgtgtacgcaccgaacagatggagaagggtgatgtcgggtatattccacaggggtatggccacagcatcgaaaatgttggagatcgtccttgtcgcgtcttgattggctttaacacaggtaactaccaagcgatcgacttatcacagtggattgcaggtaatcccgcggatgttcttgccacgaacttctccaaaccccgcagcctctttgaaaagttcccaaaacaggacgtgtttattgctcctggcaag

SEQ ID NO: 882 - protein, 359 aa, synthetic construct
  REGION 1..359: note = Variant of oxalate decarboxylase from Gemmata sp. SH-PL17
MGDPTFMNNVPDPLLSGKDLPTFKFALEKSKGKVIGGSSGKEATVVQLPISKGIAGVSMVLEPGAMRELHWHATAAEWGFVLWGHVRTTVIDPQGLAETNDFGPGDVWYFPRGHGHMLECLGDKPAHFILIFDNGYFSEFGTFSITDWIGHTPKALLAKNFKLPESAFDGFPKKEVYFARGAVPPATPAAPLQGLKLPPLTHKYELLEQEPHKVFKGGREWRVDSTRFPISKTVTGVVLDLEPGALRELHWHPNADEWQYVIDGNISVTMFGSHGRVRTEQMEKGDVGYIPQGYGHSIENVGDRPCRVLIGFNTGNYQAIDLSQWIAGNPADVLATNFSKPRSLFEKFPKQDVFIAPGK

SEQ ID NO: 883 - DNA, 1077 bp, synthetic construct
  misc_feature 1..1077: note = Variant of oxalate decarboxylase from Gemmata sp. SH-PL17
  source 1..1077: mol_type = other DNA
atgggtgaccctacctttatgaacaatgtaccagaccctctgctgtcgggcaaagatttgccgacgttcaagtttgagctggaaaagagcaagggcaaagtcattggggggagttcgggaaaagaagcaaccgttgtccagttacctatctccaaaggcattgctggtgtgagcatggtacttgaaccgggtgcgatgcgcgaattgcactggcatgccacagcagcagagtgggggttcgtattaaccggccacgtccgtacgacggtgatcgatccacaaggtgcggccgaaaccaacgactttggaccgggcgacgtgtggtattttcctcgcggtcatgggcacatgctggaatgcctgggcgataaaccggcgcatttcattctgatcttcgataacggctacttctcagagtttggcaccttctctattactgactggatcggtcacacaccgaaagcgcttctcgccaagaactttaagctgcccgaatcggcttttgatgggtttcccaaaaaagaggtctattttgcacgtggcgcggttccaccagccacccctgcagcgcctttacagggactgaagctgccaccactcacgcataaatacgaactcctcgaacaagaacctcataaagtttttaaaggtggtcgtgaatggcgcgtggatagcactcgttttcccatttccaagactgtaaccggcgttgttcttgatttggaacccggcgcgttacgcgagcttcactggcatcctaatgctgacgagtggcaatatgtgatcgatggcaacattagtgtgacgatgttcggttctcatggccgtactcgcaccgaacagatggagaagggtgatgtcgggtatattccacaggggtatggccacagcatcgaaaatgttggagatcgtccttgtcgcgtcttgattggctttaacacaggtaactaccaagcgatcgacttatcacagtggattgcaggtaatcccgcggatgttcttgccacgaacttctccaaacccaccagcctctttgaaaagttcccaaaacaggacgtgtttattgctcctggcaag

SEQ ID NO: 884 - protein, 359 aa, synthetic construct
  REGION 1..359: note = Variant of oxalate decarboxylase from Gemmata sp. SH-PL17
MGDPTFMNNVPDPLLSGKDLPTFKFELEKSKGKVIGGSSGKEATVVQLPISKGIAGVSMVLEPGAMRELHWHATAAEWGFVLTGHVRTTVIDPQGAAETNDFGPGDVWYFPRGHGHMLECLGDKPAHFILIFDNGYFSEFGTFSITDWIGHTPKALLAKNFKLPESAFDGFPKKEVYFARGAVPPATPAAPLQGLKLPPLTHKYELLEQEPHKVFKGGREWRVDSTRFPISKTVTGVVLDLEPGALRELHWHPNADEWQYVIDGNISVTMFGSHGRTRTEQMEKGDVGYIPQGYGHSIENVGDRPCRVLIGFNTGNYQAIDLSQWIAGNPADVLATNFSKPTSLFEKFPKQDVFIAPGK

SEQ ID NO: 885 - DNA, 1077 bp, synthetic construct
  misc_feature 1..1077: note = Variant of oxalate decarboxylase from Gemmata sp. SH-PL17
  source 1..1077: mol_type = other DNA
atgggtgaccctacctttatgaacaatgtaccagaccctctgctgtcgggcaaagatttgccgacgttcaagtttgcgctggaaaagagcaagggcaaagtcattggggggagttcgggaaaagaagcaaccgttgtccagttacctatctccaaaggcattgctggtgtgagcatggtacttgaaccgggtgcgatgcgcgaattgcactggcatgccacagcagcagagtgggggttcgtattaaccggccacgtccgtacgacggtgatcgatccacaaggtgcggccgaaaccaacgactttggaccgggcgacgtgtggtattttcctcgcggtcatgggcacatgctggaatgcctgggcgataaaccggcgcatttcattctgatcttcgataacggctacttctcagagtttggcaccttctctattactgactggatcggtcacacaccgaaagcgcttctcgccaagaactttaagctgcccgaaagcgcttttgatgggtttcccaaaaaagaggtctattttgcacgtggcgcggttccaccagccacccctgcagcgcctttacagggactgaagctgccaccactcacgcataaatacgaactcctcgaacaagaacctcataaagtttttaaaggtggtcgtgaatggcgcgtggatagcactcgttttcccatttccaagactgtaaccggcgttgttcttgatttggaacccggcgcgttacgcgagcttcactggcatcctaatgctgacgagtggcaatatgtgatcgatggcaacattagtgtgacgatgttcggttctcatggccgtactcgcaccgaacagatggagaagggtgatgtcgggtatattccacaggggtatggccacagcatcgaaaatgttggagatcgtccttgtcgcgtcttgattggctttaacacaggtaactaccaagcgatcgacttatcacagtggattgcaggtaatcccgcggatgttcttgccacgaacttctccaaaccccgcagcctctttgaaaagttcccaaaacaggacgtgtttattgctcctggcaag

SEQ ID NO: 886 - protein, 359 aa, synthetic construct
  REGION 1..359: note = Variant of oxalate decarboxylase from Gemmata sp. SH-PL17
MGDPTFMNNVPDPLLSGKDLPTFKFALEKSKGKVIGGSSGKEATVVQLPISKGIAGVSMVLEPGAMRELHWHATAAEWGFVLTGHVRTTVIDPQGAAETNDFGPGDVWYFPRGHGHMLECLGDKPAHFILIFDNGYFSEFGTFSITDWIGHTPKALLAKNFKLPESAFDGFPKKEVYFARGAVPPATPAAPLQGLKLPPLTHKYELLEQEPHKVFKGGREWRVDSTRFPISKTVTGVVLDLEPGALRELHWHPNADEWQYVIDGNISVTMFGSHGRTRTEQMEKGDVGYIPQGYGHSIENVGDRPCRVLIGFNTGNYQAIDLSQWIAGNPADVLATNFSKPRSLFEKFPKQDVFIAPGK

SEQ ID NO: 887 - DNA, 1077 bp, synthetic construct
  misc_feature 1..1077: note = Variant of oxalate decarboxylase from Gemmata sp. SH-PL17
  source 1..1077: mol_type = other DNA
atgggtgaccctacctttatgaacaatgtaccagaccctctgctgtcgggcaaagatttgccgacgttcaagtttgagctggaaaagagcaagggcaaagtcattggggggagttcgggaaaagaagcaaccgttgtccagttacctatctccaaaggcattgctggtgtgagcatggtacttgaaccgggtgcgatgcgcgaattgcactggcatgccacagcagcagagtgggggttcgtattatggggccacgtccgtacgacggtgatcgatccacaaggtgccgccgaaaccaacgactttggaccgggcgacgtgtggtattttcctcgcggtcatgggcacatgctggaatgcctgggcgataaaccggcgcatttcattctgatcttcgataacggctacttctcagagtttggcaccttctctattactgactggatcggtcacacaccgaaagcgcttctcgccaagaactttaagctgcccgaatcggcttttgatgggtttcccaaaaaagaggtctattttgcacgtggcgcggttccaccagccacccctgcagcgcctttacagggactgaagctgccaccactcacgcataaatacgaactcctcgaacaagaacctcataaagtttttaaaggtggtcgtgaatggcgcgtggatagcactcgttttcccatttccaagactgtaaccggcgttgttcttgatttggaacccggcgcgttacgcgagcttcactggcatcctaatgctgacgagtggcaatatgtgatcgatggcaacattagtgtgacgatgttcggttctcatggccgtgtacgcaccgaacagatggagaagggtgatgtcgggtatattccacaggggtatggccacagcatcgaaaatgttggagatcgtccttgtcgcgtcttgattggctttaacacaggtaactaccaagcgatcgacttatcacagtggattgcaggtaatcccgcggatgttcttgccacgaacttctccaaaccccgcagcctctttgaaaagttcccaaaacaggacgtgtttattgctcctggcaag

SEQ ID NO: 888 - protein, 359 aa, synthetic construct
  REGION 1..359: note = Variant of oxalate decarboxylase from Gemmata sp. SH-PL17
MGDPTFMNNVPDPLLSGKDLPTFKFELEKSKGKVIGGSSGKEATVVQLPISKGIAGVSMVLEPGAMRELHWHATAAEWGFVLWGHVRTTVIDPQGAAETNDFGPGDVWYFPRGHGHMLECLGDKPAHFILIFDNGYFSEFGTFSITDWIGHTPKALLAKNFKLPESAFDGFPKKEVYFARGAVPPATPAAPLQGLKLPPLTHKYELLEQEPHKVFKGGREWRVDSTRFPISKTVTGVVLDLEPGALRELHWHPNADEWQYVIDGNISVTMFGSHGRVRTEQMEKGDVGYIPQGYGHSIENVGDRPCRVLIGFNTGNYQAIDLSQWIAGNPADVLATNFSKPRSLFEKFPKQDVFIAPGK

SEQ ID NO: 889 - DNA, 1077 bp, synthetic construct
  misc_feature 1..1077: note = Variant of oxalate decarboxylase from Gemmata sp. SH-PL17
  source 1..1077: mol_type = other DNA
atgggtgaccctacctttatgaacaatgtaccagaccctctgctgtcgggcaaagatttgccgacgttcaagtttgagctggaaaagagcaagggcaaagtcattggggggagttcgggaaaagaagcaaccgttgtccagttacctatctccaaaggcattgctggtgtgagcatggtacttgaaccgggtgcgatgcgcgaattgcactggcatgccacagcagcagagtgggggttcgtattacgcggccacgtccgtacgacggtgatcgatccacaaggtgccgccgaaaccaacgactttggaccgggcgacgtgtggtattttcctcgcggtcatgggcacatgctggaatgcctgggcgataaaccggcgcatttcattctgatcttcgataacggctacttctcagagtttggcaccttctctattactgactggatcggtcacacaccgaaagcgcttctcgccaagaactttaagctgcccgaatcggcttttgatgggtttcccaaaaaagaggtctattttgcacgtggcgcggttccaccagccacccctgcagcgcctttacagggactgaagctgccaccactcacgcataaatacgaactcctcgaacaagaacctcataaagtttttaaaggtggtcgtgaatggcgcgtggatagcactcgttttcccatttccaagactgtaaccggcgttgttcttgatttggaacccggcgcgttacgcgagcttcactggcatcctaatgctgacgagtggcaatatgtgatcgatggcaacattagtgtgacgatgttcggttctcatggccgtgtacgcaccgaacagatggagaagggtgatgtcgggtatattccacaggggtatggccacagcatcgaaaatgttggagatcgtccttgtcgcgtcttgattggctttaacacaggtaactaccaagcgatcgacttatcacagtggattgcaggtaatcccgcggatgttcttgccacgaacttctccaaacccaccagcctctttgaaaagttcccaaaacaggacgtgtttattgctcctggcaag

SEQ ID NO: 890 - protein, 359 aa, synthetic construct
  REGION 1..359: note = Variant of oxalate decarboxylase from Gemmata sp. SH-PL17
MGDPTFMNNVPDPLLSGKDLPTFKFELEKSKGKVIGGSSGKEATVVQLPISKGIAGVSMVLEPGAMRELHWHATAAEWGFVLRGHVRTTVIDPQGAAETNDFGPGDVWYFPRGHGHMLECLGDKPAHFILIFDNGYFSEFGTFSITDWIGHTPKALLAKNFKLPESAFDGFPKKEVYFARGAVPPATPAAPLQGLKLPPLTHKYELLEQEPHKVFKGGREWRVDSTRFPISKTVTGVVLDLEPGALRELHWHPNADEWQYVIDGNISVTMFGSHGRVRTEQMEKGDVGYIPQGYGHSIENVGDRPCRVLIGFNTGNYQAIDLSQWIAGNPADVLATNFSKPTSLFEKFPKQDVFIAPGK

SEQ ID NO: 891 - DNA, 1077 bp, synthetic construct
  misc_feature 1..1077: note = Variant of oxalate decarboxylase from Gemmata sp. SH-PL17
  source 1..1077: mol_type = other DNA
atgggtgaccctagctttatgaacaatgtaccagaccctctgctgtcgggcaaagatttgccgacgttcaagtttgagctggaaaagagcaagggcaaagtcattggggggagttcgggaaaagaagcaaccgttgtccagttacctatctccaaaggcattgctggtgtgagcatggtacttgaaccgggtgcgatgcgcgaattgcactggcatgccacagcagcagagtgggggttcgtattaaccggccacgtccgtacgacggtgatcgatccacaaggtgcggccgaaaccaacgactttggaccgggcgacgtgtggtattttcctcgcggtcatgggcacatgctggaatgcctgggcgataaaccggcgcatttcattctgatcttcgataacggctacttctcagagtttggcaccttctctattactgactggatcggtcacacaccgaaagcgcttctcgccaagaactttaagctgcccgaatcggcttttgatgggtttcccaaaaaagaggtctattttgcacgtggcgcggttccaccagccacccctgcagcgcctttacagggactgaagctgccaccactcacgcataaatacgaactcctcgaacaagaacctcataaagtttttaaaggtggtcgtgaatggcgcgtggatagcactcgttttcccatttccaagactgtaaccggcgttgttcttgatttggaacccggcgcgttacgcgagcttcactggcatcctaatgctgacgagtggcaatatgtgatcgatggcaacattagtgtgacgatgttcggttctcatggccgttaccgcaccgaacagatggagaagggtgatgtcgggtatattccacaggggtatggccacagcatcgaaaatgttggagatcgtccttgtcgcgtcttgattggctttaacacaggtaactaccaagcgatcgacttatcacagtggattgcaggtaatcccgcggatgttcttgccacgaacttctccaaacccaccagcctctttgaaaagttcccaaaacaggacgtgtttattgctcctggcaag

SEQ ID NO: 892 - protein, 359 aa, synthetic construct
  REGION 1..359: note = Variant of oxalate decarboxylase from Gemmata sp. SH-PL17
MGDPSFMNNVPDPLLSGKDLPTFKFELEKSKGKVIGGSSGKEATVVQLPISKGIAGVSMVLEPGAMRELHWHATAAEWGFVLTGHVRTTVIDPQGAAETNDFGPGDVWYFPRGHGHMLECLGDKPAHFILIFDNGYFSEFGTFSITDWIGHTPKALLAKNFKLPESAFDGFPKKEVYFARGAVPPATPAAPLQGLKLPPLTHKYELLEQEPHKVFKGGREWRVDSTRFPISKTVTGVVLDLEPGALRELHWHPNADEWQYVIDGNISVTMFGSHGRYRTEQMEKGDVGYIPQGYGHSIENVGDRPCRVLIGFNTGNYQAIDLSQWIAGNPADVLATNFSKPTSLFEKFPKQDVFIAPGK

SEQ ID NO: 893 - DNA, 1077 bp, synthetic construct
  misc_feature 1..1077: note = Variant of oxalate decarboxylase from Gemmata sp. SH-PL17
  source 1..1077: mol_type = other DNA
atgggtgaccctacctttatgaacaatgtaccagaccctctgctgtcgggcaaagatttgccgacgttcaagtttgcgctggaaaagagcaagggcaaagtcattggggggagttcgggaaaagaagcaaccgttgtccagttacctatctccaaaggcattgctggtgtgagcatggtacttgaaccgggtgcgatgcgcgaattgcactggcatgccacagcagcagagtgggggttcgtattaaccggccacgtccgtacgacggtgatcgatccacaaggtgcggccgaaaccaacgactttggaccgggcgacgtgtggtattttcctcgcggtcatgggcacatgctggaatgcctgggcgataaaccggcgcatttcattctgatcttcgataacggctacttctcagagtttggcaccttctctattactgactggatcggtcacacaccgaaagcgcttctcgccaagaactttaagctgcccgaaagcgcttttgatgggtttcccaaaaaagaggtctattttgcacgtggcgcggttccaccagccacccctgcagcgcctttacagggactgaagctgccaccactcacgcataaatacgaactcctcgaacaagaacctcataaagtttttaaaggtggtcgtgaatggcgcgtggatagcactcgttttcccatttccaagactgtaaccggcgttgttcttgatttggaacccggcgcgttacgcgagcttcactggcatcctaatgctgacgagtggcaatatgtgatcgatggcaacattagtgtgacgatgttcggttctcatggccgtgtacgcaccgaacagatggagaagggtgatgtcgggtatattccacaggggtatggccacagcatcgaaaatgttggagatcgtccttgtcgcgtcttgattggctttaacacaggtaactaccaagcgatcgacttatcacagtggattgcaggtaatcccgcggatgttcttgccacgaacttctccaaacccaccagcctctttgaaaagttcccaaaacaggacgtgtttattgctcctggcaag

SEQ ID NO: 894 - protein, 359 aa, synthetic construct
  REGION 1..359: note = Variant of oxalate decarboxylase from Gemmata sp. SH-PL17
MGDPTFMNNVPDPLLSGKDLPTFKFALEKSKGKVIGGSSGKEATVVQLPISKGIAGVSMVLEPGAMRELHWHATAAEWGFVLTGHVRTTVIDPQGAAETNDFGPGDVWYFPRGHGHMLECLGDKPAHFILIFDNGYFSEFGTFSITDWIGHTPKALLAKNFKLPESAFDGFPKKEVYFARGAVPPATPAAPLQGLKLPPLTHKYELLEQEPHKVFKGGREWRVDSTRFPISKTVTGVVLDLEPGALRELHWHPNADEWQYVIDGNISVTMFGSHGRVRTEQMEKGDVGYIPQGYGHSIENVGDRPCRVLIGFNTGNYQAIDLSQWIAGNPADVLATNFSKPTSLFEKFPKQDVFIAPGK

SEQ ID NO: 895 - DNA, 1077 bp, synthetic construct
  misc_feature 1..1077: note = Variant of oxalate decarboxylase from Gemmata sp. SH-PL17
  source 1..1077: mol_type = other DNA
atgggtgaccctacctttatgaacaatgtaccagaccctctgctgtcgggcaaagatttgccgacgttcaagtttgagctggaaaagagcaagggcaaagtcattggggggagttcgggaaaagaagcaaccgttgtccagttacctatctccaaaggcattgctggtgtgagcatggtacttgaaccgggtgcgatgcgcgaattgcactggcatgccacagcagcagagtgggggttcgtattacgcggccacgtccgtacgacggtgatcgatccacaaggtgcggccgaaaccaacgactttggaccgggcgacgtgtggtattttcctcgcggtcatgggcacatgctggaatgcctgggcgataaaccggcgcatttcattctgatcttcgataacggctacttctcagagtttggcaccttctctattactgactggatcggtcacacaccgaaagcgcttctcgccaagaactttaagctgcccgaatcggcttttgatgggtttcccaaaaaagaggtctattttgcacgtggcgcggttccaccagccacccctgcagcgcctttacagggactgaagctgccaccactcacgcataaatacgaactcctcgaacaagaacctcataaagtttttaaaggtggtcgtgaatggcgcgtggatagcactcgttttcccatttccaagactgtaaccggcgttgttcttgatttggaacccggcgcgttacgcgagcttcactggcatcctaatgctgacgagtggcaatatgtgatcgatggcaacattagtgtgacgatgttcggttctcatggccgtactcgcaccgaacagatggagaagggtgatgtcgggtatattccacaggggtatggccacagcatcgaaaatgttggagatcgtccttgtcgcgtcttgattggctttaacacaggtaactaccaagcgatcgacttatcacagtggattgcaggtaatcccgcggatgttcttgccacgaacttctccaaacccaccagcctctttgaaaagttcccaaaacaggacgtgtttattgctcctggcaag

SEQ ID NO: 896 - protein, 359 aa, synthetic construct
  REGION 1..359: note = Variant of oxalate decarboxylase from Gemmata sp. SH-PL17
MGDPTFMNNVPDPLLSGKDLPTFKFELEKSKGKVIGGSSGKEATVVQLPISKGIAGVSMVLEPGAMRELHWHATAAEWGFVLRGHVRTTVIDPQGAAETNDFGPGDVWYFPRGHGHMLECLGDKPAHFILIFDNGYFSEFGTFSITDWIGHTPKALLAKNFKLPESAFDGFPKKEVYFARGAVPPATPAAPLQGLKLPPLTHKYELLEQEPHKVFKGGREWRVDSTRFPISKTVTGVVLDLEPGALRELHWHPNADEWQYVIDGNISVTMFGSHGRTRTEQMEKGDVGYIPQGYGHSIENVGDRPCRVLIGFNTGNYQAIDLSQWIAGNPADVLATNFSKPTSLFEKFPKQDVFIAPGK

SEQ ID NO: 897 - DNA, 1077 bp, synthetic construct
  misc_feature 1..1077: note = Variant of oxalate decarboxylase from Gemmata sp. SH-PL17
  source 1..1077: mol_type = other DNA
atgggtgaccctagctttatgaacaatgtaccagaccctctgctgtcgggcaaagatttgccgacgttcaagtttgagctggaaaagagcaagggcaaagtcattggggggagttcgggaaaagaagcaaccgttgtccagttacctatctccaaaggcattgctggtgtgagcatggtacttgaaccgggtgcgatgcgcgaattgcactggcatgccacagcagcagagtgggggttcgtattatggggccacgtccgtacgacggtgatcgatccacaaggtcgcgccgaaaccaacgactttggaccgggcgacgtgtggtattttcctcgcggtcatgggcacatgctggaatgcctgggcgataaaccggcgcatttcattctgatcttcgataacggctacttctcagagtttggcaccttctctattactgactggatcggtcacacaccgaaagcgcttctcgccaagaactttaagctgcccgaaagcgcttttgatgggtttcccaaaaaagaggtctattttgcacgtggcgcggttccaccagccacccctgcagcgcctttacagggactgaagctgccaccactcacgcataaatacgaactcctcgaacaagaacctcataaagtttttaaaggtggtcgtgaatggcgcgtggatagcactcgttttcccatttccaagactgtaaccggcgttgttcttgatttggaacccggcgcgttacgcgagcttcactggcatcctaatgctgacgagtggcaatatgtgatcgatggcaacattagtgtgacgatgttcggttctcatggccgtactcgcaccgaacagatggagaagggtgatgtcgggtatattccacaggggtatggccacagcatcgaaaatgttggagatcgtccttgtcgcgtcttgattggctttaacacaggtaactaccaagcgatcgacttatcacagtggattgcaggtaatcccgcggatgttcttgccacgaacttctccaaaccccgcagcctctttgaaaagttcccaaaacaggacgtgtttattgctcctggcaag

SEQ ID NO: 898 - protein, 359 aa, synthetic construct
  REGION 1..359: note = Variant of oxalate decarboxylase from Gemmata sp. SH-PL17
MGDPSFMNNVPDPLLSGKDLPTFKFELEKSKGKVIGGSSGKEATVVQLPISKGIAGVSMVLEPGAMRELHWHATAAEWGFVLWGHVRTTVIDPQGRAETNDFGPGDVWYFPRGHGHMLECLGDKPAHFILIFDNGYFSEFGTFSITDWIGHTPKALLAKNFKLPESAFDGFPKKEVYFARGAVPPATPAAPLQGLKLPPLTHKYELLEQEPHKVFKGGREWRVDSTRFPISKTVTGVVLDLEPGALRELHWHPNADEWQYVIDGNISVTMFGSHGRTRTEQMEKGDVGYIPQGYGHSIENVGDRPCRVLIGFNTGNYQAIDLSQWIAGNPADVLATNFSKPRSLFEKFPKQDVFIAPGK

SEQ ID NO: 899 - DNA, 1077 bp, synthetic construct
  misc_feature 1..1077: note = Variant of oxalate decarboxylase from Gemmata sp. SH-PL17
  source 1..1077: mol_type = other DNA
atgggtgaccctagctttatgaacaatgtaccagaccctctgctgtcgggcaaagatttgccgacgttcaagtttgagctggaaaagagcaagggcaaagtcattggggggagttcgggaaaagaagcaaccgttgtccagttacctatctccaaaggcattgctggtgtgagcatggtacttgaaccgggtgcgatgcgcgaattgcactggcatgccacagcagcagagtgggggttcgtattaaccggccacgtccgtacgacggtgatcgatccacaaggtgcggccgaaaccaacgactttggaccgggcgacgtgtggtattttcctcgcggtcatgggcacatgctggaatgcctgggcgataaaccggcgcatttcattctgatcttcgataacggctacttctcagagtttggcaccttctctattactgactggatcggtcacacaccgaaagcgcttctcgccaagaactttaagctgcccgaatcggcttttgatgggtttcccaaaaaagaggtctattttgcacgtggcgcggttccaccagccacccctgcagcgcctttacagggactgaagctgccaccactcacgcataaatacgaactcctcgaacaagaacctcataaagtttttaaaggtggtcgtgaatggcgcgtggatagcactcgttttcccatttccaagactgtaaccggcgttgttcttgatttggaacccggcgcgttacgcgagcttcactggcatcctaatgctgacgagtggcaatatgtgatcgatggcaacattagtgtgacgatgttcggttctcatggccgtgtacgcaccgaacagatggagaagggtgatgtcgggtatattccacaggggtatggccacagcatcgaaaatgttggagatcgtccttgtcgcgtcttgattggctttaacacaggtaactaccaagcgatcgacttatcacagtggattgcaggtaatcccgcggatgttcttgccacgaacttctccaaacccaccagcctctttgaaaagttcccaaaacaggacgtgtttattgctcctggcaag

SEQ ID NO: 900 - protein, 359 aa, synthetic construct
  REGION 1..359: note = Variant of oxalate decarboxylase from Gemmata sp. SH-PL17
MGDPSFMNNVPDPLLSGKDLPTFKFELEKSKGKVIGGSSGKEATVVQLPISKGIAGVSMVLEPGAMRELHWHATAAEWGFVLTGHVRTTVIDPQGAAETNDFGPGDVWYFPRGHGHMLECLGDKPAHFILIFDNGYFSEFGTFSITDWIGHTPKALLAKNFKLPESAFDGFPKKEVYFARGAVPPATPAAPLQGLKLPPLTHKYELLEQEPHKVFKGGREWRVDSTRFPISKTVTGVVLDLEPGALRELHWHPNADEWQYVIDGNISVTMFGSHGRVRTEQMEKGDVGYIPQGYGHSIENVGDRPCRVLIGFNTGNYQAIDLSQWIAGNPADVLATNFSKPTSLFEKFPKQDVFIAPGK

SEQ ID NO: 901 - DNA, 1077 bp, synthetic construct
  misc_feature 1..1077: note = Variant of oxalate decarboxylase from Gemmata sp. SH-PL17
  source 1..1077: mol_type = other DNA
atgggtgaccctacctttatgaacaatgtaccagaccctctgctgtcgggcaaagatttgccgacgttcaagtttgagctggaaaagagcaagggcaaagtcattggggggagttcgggaaaagaagcaaccgttgtccagttacctatctccaaaggcattgctggtgtgagcatggtacttgaaccgggtgcgatgcgcgaattgcactggcatgccacagcagcagagtgggggttcgtattaaccggccacgtccgtacgacggtgatcgatccacaaggtgcggccgaaaccaacgactttggaccgggcgacgtgtggtattttcctcgcggtcatgggcacatgctggaatgcctgggcgataaaccggcgcatttcattctgatcttcgataacggctacttctcagagtttggcaccttctctattactgactggatcggtcacacaccgaaagcgcttctcgccaagaactttaagctgcccgaaagcgcttttgatgggtttcccaaaaaagaggtctattttgcacgtggcgcggttccaccagccacccctgcagcgcctttacagggactgaagctgccaccactcacgcataaatacgaactcctcgaacaagaacctcataaagtttttaaaggtggtcgtgaatggcgcgtggatagcactcgttttcccatttccaagactgtaaccggcgttgttcttgatttggaacccggcgcgttacgcgagcttcactggcatcctaatgctgacgagtggcaatatgtgatcgatggcaacattagtgtgacgatgttcggttctcatggccgtgtacgcaccgaacagatggagaagggtgatgtcgggtatattccacaggggtatggccacagcatcgaaaatgttggagatcgtccttgtcgcgtcttgattggctttaacacaggtaactaccaagcgatcgacttatcacagtggattgcaggtaatcccgcggatgttcttgccacgaacttctccaaacccaccagcctctttgaaaagttcccaaaacaggacgtgtttattgctcctggcaag

SEQ ID NO: 902 - protein, 359 aa, synthetic construct
  REGION 1..359: note = Variant of oxalate decarboxylase from Gemmata sp. SH-PL17
MGDPTFMNNVPDPLLSGKDLPTFKFELEKSKGKVIGGSSGKEATVVQLPISKGIAGVSMVLEPGAMRELHWHATAAEWGFVLTGHVRTTVIDPQGAAETNDFGPGDVWYFPRGHGHMLECLGDKPAHFILIFDNGYFSEFGTFSITDWIGHTPKALLAKNFKLPESAFDGFPKKEVYFARGAVPPATPAAPLQGLKLPPLTHKYELLEQEPHKVFKGGREWRVDSTRFPISKTVTGVVLDLEPGALRELHWHPNADEWQYVIDGNISVTMFGSHGRVRTEQMEKGDVGYIPQGYGHSIENVGDRPCRVLIGFNTGNYQAIDLSQWIAGNPADVLATNFSKPTSLFEKFPKQDVFIAPGK

SEQ ID NO: 903 - DNA, 1077 bp, synthetic construct
  misc_feature 1..1077: note = Variant of oxalate decarboxylase from Gemmata sp. SH-PL17
  source 1..1077: mol_type = other DNA
atgggtgaccctagctttatgaacaatgtaccagaccctctgctgtcgggcaaagatttgccgacgttcaagtttgagctggaaaagagcaagggcaaagtcattggggggagttcgggaaaagaagcaaccgttgtccagttacctatctccaaaggcattgctggtgtgagcatggtacttgaaccgggtgcgatgcgcgaattgcactggcatgccacagcagcagagtgggggttcgtattaaccggccacgtccgtacgacggtgatcgatccacaaggtgccgccgaaaccaacgactttggaccgggcgacgtgtggtattttcctcgcggtcatgggcacatgctggaatgcctgggcgataaaccggcgcatttcattctgatcttcgataacggctacttctcagagtttggcaccttctctattactgactggatcggtcacacaccgaaagcgcttctcgccaagaactttaagctgcccgaatcggcttttgatgggtttcccaaaaaagaggtctattttgcacgtggcgcggttccaccagccacccctgcagcgcctttacagggactgaagctgccaccactcacgcataaatacgaactcctcgaacaagaacctcataaagtttttaaaggtggtcgtgaatggcgcgtggatagcactcgttttcccatttccaagactgtaaccggcgttgttcttgatttggaacccggcgcgttacgcgagcttcactggcatcctaatgctgacgagtggcaatatgtgatcgatggcaacattagtgtgacgatgttcggttctcatggccgtgtacgcaccgaacagatggagaagggtgatgtcgggtatattccacaggggtatggccacagcatcgaaaatgttggagatcgtccttgtcgcgtcttgattggctttaacacaggtaactaccaagcgatcgacttatcacagtggattgcaggtaatcccgcggatgttcttgccacgaacttctccaaaccccgcagcctctttgaaaagttcccaaaacaggacgtgtttattgctcctggcaag

SEQ ID NO: 904 - protein, 359 aa, synthetic construct
  REGION 1..359: note = Variant of oxalate decarboxylase from Gemmata sp. SH-PL17
MGDPSFMNNVPDPLLSGKDLPTFKFELEKSKGKVIGGSSGKEATVVQLPISKGIAGVSMVLEPGAMRELHWHATAAEWGFVLTGHVRTTVIDPQGAAETNDFGPGDVWYFPRGHGHMLECLGDKPAHFILIFDNGYFSEFGTFSITDWIGHTPKALLAKNFKLPESAFDGFPKKEVYFARGAVPPATPAAPLQGLKLPPLTHKYELLEQEPHKVFKGGREWRVDSTRFPISKTVTGVVLDLEPGALRELHWHPNADEWQYVIDGNISVTMFGSHGRVRTEQMEKGDVGYIPQGYGHSIENVGDRPCRVLIGFNTGNYQAIDLSQWIAGNPADVLATNFSKPRSLFEKFPKQDVFIAPGK

SEQ ID NO: 905 - DNA, 1077 bp, synthetic construct
  misc_feature 1..1077: note = Variant of oxalate decarboxylase from Gemmata sp. SH-PL17
  source 1..1077: mol_type = other DNA
atgggtgaccctacctttatgaacaatgtaccagaccctctgctgtcgggcaaagatttgccgacgttcaagtttgagctggaaaagagcaagggcaaagtcattggggggagttcgggaaaagaagcaaccgttgtccagttacctatctccaaaggcattgctggtgtgagcatggtacttgaaccgggtgcgatgcgcgaattgcactggcatgccacagcagcagagtgggggttcgtattatggggccacgtccgtacgacggtgatcgatccacaaggtctggccgaaaccaacgactttggaccgggcgacgtgtggtattttcctcgcggtcatgggcacatgctggaatgcctgggcgataaaccggcgcatttcattctgatcttcgataacggctacttctcagagtttggcaccttctctattactgactggatcggtcacacaccgaaagcgcttctcgccaagaactttaagctgcccgaaagcgcttttgatgggtttcccaaaaaagaggtctattttgcacgtggcgcggttccaccagccacccctgcagcgcctttacagggactgaagctgccaccactcacgcataaatacgaactcctcgaacaagaacctcataaagtttttaaaggtggtcgtgaatggcgcgtggatagcactcgttttcccatttccaagactgtaaccggcgttgttcttgatttggaacccggcgcgttacgcgagcttcactggcatcctaatgctgacgagtggcaatatgtgatcgatggcaacattagtgtgacgatgttcggttctcatggccgtgtacgcaccgaacagatggagaagggtgatgtcgggtatattccacaggggtatggccacagcatcgaaaatgttggagatcgtccttgtcgcgtcttgattggctttaacacaggtaactaccaagcgatcgacttatcacagtggattgcaggtaatcccgcggatgttcttgccacgaacttctccaaacccaccagcctctttgaaaagttcccaaaacaggacgtgtttattgctcctggcaag

SEQ ID NO: 906 - protein, 359 aa, synthetic construct
  REGION 1..359: note = Variant of oxalate decarboxylase from Gemmata sp. SH-PL17
MGDPTFMNNVPDPLLSGKDLPTFKFELEKSKGKVIGGSSGKEATVVQLPISKGIAGVSMVLEPGAMRELHWHATAAEWGFVLWGHVRTTVIDPQGLAETNDFGPGDVWYFPRGHGHMLECLGDKPAHFILIFDNGYFSEFGTFSITDWIGHTPKALLAKNFKLPESAFDGFPKKEVYFARGAVPPATPAAPLQGLKLPPLTHKYELLEQEPHKVFKGGREWRVDSTRFPISKTVTGVVLDLEPGALRELHWHPNADEWQYVIDGNISVTMFGSHGRVRTEQMEKGDVGYIPQGYGHSIENVGDRPCRVLIGFNTGNYQAIDLSQWIAGNPADVLATNFSKPTSLFEKFPKQDVFIAPGK

SEQ ID NO: 907 - DNA, 1077 bp, synthetic construct
  misc_feature 1..1077: note = Variant of oxalate decarboxylase from Gemmata sp. SH-PL17
  source 1..1077: mol_type = other DNA
atgggtgaccctacctttatgaacaatgtaccagaccctctgctgtcgggcaaagatttgccgacgttcaagtttgagctggaaaagagcaagggcaaagtcattggggggagttcgggaaaagaagcaaccgttgtccagttacctatctccaaaggcattgctggtgtgagcatggtacttgaaccgggtgcgatgcgcgaattgcactggcatgccacagcagcagagtgggggttcgtattatggggccacgtccgtacgacggtgatcgatccacaaggtgcggccgaaaccaacgactttggaccgggcgacgtgtggtattttcctcgcggtcatgggcacatgctggaatgcctgggcgataaaccggcgcatttcattctgatcttcgataacggctacttctcagagtttggcaccttctctattactgactggatcggtcacacaccgaaagcgcttctcgccaagaactttaagctgcccgaatcggcttttgatgggtttcccaaaaaagaggtctattttgcacgtggcgcggttccaccagccacccctgcagcgcctttacagggactgaagctgccaccactcacgcataaatacgaactcctcgaacaagaacctcataaagtttttaaaggtggtcgtgaatggcgcgtggatagcactcgttttcccatttccaagactgtaaccggcgttgttcttgatttggaacccggcgcgttacgcgagcttcactggcatcctaatgctgacgagtggcaatatgtgatcgatggcaacattagtgtgacgatgttcggttctcatggccgtgtacgcaccgaacagatggagaagggtgatgtcgggtatattccacaggggtatggccacagcatcgaaaatgttggagatcgtccttgtcgcgtcttgattggctttaacacaggtaactaccaagcgatcgacttatcacagtggattgcaggtaatcccgcggatgttcttgccacgaacttctccaaacccaccagcctctttgaaaagttcccaaaacaggacgtgtttattgctcctggcaag

SEQ ID NO: 908 - protein, 359 aa, synthetic construct
  REGION 1..359: note = Variant of oxalate decarboxylase from Gemmata sp. SH-PL17
MGDPTFMNNVPDPLLSGKDLPTFKFELEKSKGKVIGGSSGKEATVVQLPISKGIAGVSMVLEPGAMRELHWHATAAEWGFVLWGHVRTTVIDPQGAAETNDFGPGDVWYFPRGHGHMLECLGDKPAHFILIFDNGYFSEFGTFSITDWIGHTPKALLAKNFKLPESAFDGFPKKEVYFARGAVPPATPAAPLQGLKLPPLTHKYELLEQEPHKVFKGGREWRVDSTRFPISKTVTGVVLDLEPGALRELHWHPNADEWQYVIDGNISVTMFGSHGRVRTEQMEKGDVGYIPQGYGHSIENVGDRPCRVLIGFNTGNYQAIDLSQWIAGNPADVLATNFSKPTSLFEKFPKQDVFIAPGK

SEQ ID NO: 909 - DNA, 1077 bp, synthetic construct
  misc_feature 1..1077: note = Variant of oxalate decarboxylase from Gemmata sp. SH-PL17
  source 1..1077: mol_type = other DNA
atgggtgaccctacctttatgaacaatgtaccagaccctctgctgtcgggcaaagatttgccgacgttcaagtttctgctggaaaagagcaagggcaaagtcattggggggagttcgggaaaagaagcaaccgttgtccagttacctatctccaaaggcattgctggtgtgagcatggtacttgaaccgggtgcgatgcgcgaattgcactggcatgccacagcagcagagtgggggttcgtattatggggccacgtccgtacgacggtgatcgatccacaaggtctggccgaaaccaacgactttggaccgggcgacgtgtggtattttcctcgcggtcatgggcacatgctggaatgcctgggcgataaaccggcgcatttcattctgatcttcgataacggctacttctcagagtttggcaccttctctattactgactggatcggtcacacaccgaaagcgcttctcgccaagaactttaagctgcccgaaagcgcttttgatgggtttcccaaaaaagaggtctattttgcacgtggcgcggttccaccagccacccctgcagcgcctttacagggactgaagctgccaccactcacgcataaatacgaactcctcgaacaagaacctcataaagtttttaaaggtggtcgtgaatggcgcgtggatagcactcgttttcccatttccaagactgtaaccggcgttgttcttgatttggaacccggcgcgttacgcgagcttcactggcatcctaatgctgacgagtggcaatatgtgatcgatggcaacattagtgtgacgatgttcggttctcatggccgtgtacgcaccgaacagatggagaagggtgatgtcgggtatattccacaggggtatggccacagcatcgaaaatgttggagatcgtccttgtcgcgtcttgattggctttaacacaggtaactaccaagcgatcgacttatcacagtggattgcaggtaatcccgcggatgttcttgccacgaacttctccaaacccaccagcctctttgaaaagttcccaaaacaggacgtgtttattgctcctggcaag

SEQ ID NO: 910 - protein, 359 aa, synthetic construct
  REGION 1..359: note = Variant of oxalate decarboxylase from Gemmata sp. SH-PL17
MGDPTFMNNVPDPLLSGKDLPTFKFLLEKSKGKVIGGSSGKEATVVQLPISKGIAGVSMVLEPGAMRELHWHATAAEWGFVLWGHVRTTVIDPQGLAETNDFGPGDVWYFPRGHGHMLECLGDKPAHFILIFDNGYFSEFGTFSITDWIGHTPKALLAKNFKLPESAFDGFPKKEVYFARGAVPPATPAAPLQGLKLPPLTHKYELLEQEPHKVFKGGREWRVDSTRFPISKTVTGVVLDLEPGALRELHWHPNADEWQYVIDGNISVTMFGSHGRVRTEQMEKGDVGYIPQGYGHSIENVGDRPCRVLIGFNTGNYQAIDLSQWIAGNPADVLATNFSKPTSLFEKFPKQDVFIAPGK

SEQ ID NO: 911 - DNA, 1077 bp, synthetic construct
  misc_feature 1..1077: note = Variant of oxalate decarboxylase from Gemmata sp. SH-PL17
  source 1..1077: mol_type = other DNA
atgggtgaccctacctttatgaacaatgtaccagaccctctgctgtcgggcaaagatttgccgacgttcaagtttgagctggaaaagagctggggcaaagtcattggggggagttcgggaaaagaagcaaccgttgtccagttacctatctccaaaggcattgctggtgtgagcatggtacttgaaccgggtgcgatgcgcgaattgcactggcatgccacagcagcagagtgggggttcgtattatggggccacgtccgtacgacggtgatcgatccacaaggtctggccgaaaccaacgactttggaccgggcgacgtgtggtattttcctcgcggtcatgggcacatgctggaatgcctgggcgataaaccggcgcatttcattctgatcttcgataacggctacttctcagagtttggcaccttctctattactgactggatcggtcacacaccgaaagcgcttctcgccaagaactttaagctgcccgaaagcgcttttgatgggtttcccaaaaaagaggtctattttgcacgtggcgcggttccaccagccacccctgcagcgcctttacagggactgaagctgccaccactcacgcataaatacgaactcctcgaacaagaacctcataaagtttttaaaggtggtcgtgaatggcgcgtggatagcactcgttttcccatttccaagactgtaaccggcgttgttcttgatttggaacccggcgcgttacgcgagcttcactggcatcctaatgctgacgagtggcaatatgtgatcgatggcaacattagtgtgacgatgttcggttctcatggccgtgtacgcaccgaacagatggagaagggtgatgtcgggtatattccacaggggtatggccacagcatcgaaaatgttggagatcgtccttgtcgcgtcttgattggctttaacacaggtaactaccaagcgatcgacttatcacagtggattgcaggtaatcccgcggatgttcttgccacgaacttctccaaacccaccagcctctttgaaaagttcccaaaacaggacgtgtttattgctcctggcaag

SEQ ID NO: 912 - protein, 359 aa, synthetic construct
  REGION 1..359: note = Variant of oxalate decarboxylase from Gemmata sp. SH-PL17
MGDPTFMNNVPDPLLSGKDLPTFKFELEKSWGKVIGGSSGKEATVVQLPISKGIAGVSMVLEPGAMRELHWHATAAEWGFVLWGHVRTTVIDPQGLAETNDFGPGDVWYFPRGHGHMLECLGDKPAHFILIFDNGYFSEFGTFSITDWIGHTPKALLAKNFKLPESAFDGFPKKEVYFARGAVPPATPAAPLQGLKLPPLTHKYELLEQEPHKVFKGGREWRVDSTRFPISKTVTGVVLDLEPGALRELHWHPNADEWQYVIDGNISVTMFGSHGRVRTEQMEKGDVGYIPQGYGHSIENVGDRPCRVLIGFNTGNYQAIDLSQWIAGNPADVLATNFSKPTSLFEKFPKQDVFIAPGK

SEQ ID NO: 913 - DNA, 1077 bp, synthetic construct
  misc_feature 1..1077: note = Variant of oxalate decarboxylase from Gemmata sp. SH-PL17
  source 1..1077: mol_type = other DNA
atgggtgaccctacctttatgaacaatgtaccagaccctctgctgtcgggcaaagatttgccgacgttcaagtttgagctggaaaagagcaagggcaaagtcattggggggagttcgggaaaagaagcaaccgttgtccagttacctatctccaaaggcattgctggtgtgagcatggtacttgaaccgggtgcgatgcgcgaattgcactggcatgccacagcagcagagtgggggttcgtattatggggccacgtccgtacgacggtgatcgatccacaaggtaaggccgaaaccaacgactttggaccgggcgacgtgtggtattttcctcgcggtcatgggcacatgctggaatgcctgggcgataaaccggcgcatttcattctgatcttcgataacggctacttctcagagtttggcaccttctctattactgactggatcggtcacacaccgaaagcgcttctcgccaagaactttaagctgcccgaaagcgcttttgatgggtttcccaaaaaagaggtctattttgcacgtggcgcggttccaccagccacccctgcagcgcctttacagggactgaagctgccaccactcacgcataaatacgaactcctcgaacaagaacctcataaagtttttaaaggtggtcgtgaatggcgcgtggatagcactcgttttcccatttccaagactgtaaccggcgttgttcttgatttggaacccggcgcgttacgcgagcttcactggcatcctaatgctgacgagtggcaatatgtgatcgatggcaacattagtgtgacgatgttcggttctcatggccgtgtacgcaccgaacagatggagaagggtgatgtcgggtatattccacaggggtatggccacagcatcgaaaatgttggagatcgtccttgtcgcgtcttgattggctttaacacaggtaactaccaagcgatcgacttatcacagtggattgcaggtaatcccgcggatgttcttgccacgaacttctccaaacccaccagcctctttgaaaagttcccaaaacaggacgtgtttattgctcctggcaag

SEQ ID NO: 914 - protein, 359 aa, synthetic construct
  REGION 1..359: note = Variant of oxalate decarboxylase from Gemmata sp. SH-PL17
MGDPTFMNNVPDPLLSGKDLPTFKFELEKSKGKVIGGSSGKEATVVQLPISKGIAGVSMVLEPGAMRELHWHATAAEWGFVLWGHVRTTVIDPQGKAETNDFGPGDVWYFPRGHGHMLECLGDKPAHFILIFDNGYFSEFGTFSITDWIGHTPKALLAKNFKLPESAFDGFPKKEVYFARGAVPPATPAAPLQGLKLPPLTHKYELLEQEPHKVFKGGREWRVDSTRFPISKTVTGVVLDLEPGALRELHWHPNADEWQYVIDGNISVTMFGSHGRVRTEQMEKGDVGYIPQGYGHSIENVGDRPCRVLIGFNTGNYQAIDLSQWIAGNPADVLATNFSKPTSLFEKFPKQDVFIAPGK

SEQ ID NO: 915 - DNA, 1077 bp, synthetic construct
  misc_feature 1..1077: note = Variant of oxalate decarboxylase from Gemmata sp. SH-PL17
  source 1..1077: mol_type = other DNA
atgggtgaccctacctttatgaacaatgtaccagaccctctgctgtcgggcaaagatttgccgacgttcaagtttgagctggaaaagagcaagggcaaagtcattggggggagttcgggaaaagaagcaaccgttgtccagttacctatctccaaaggcattgctggtgtgagcatgcggcttgaaccgggtgcgatgcgcgaattgcactggcatgccacagcagcagagtgggggttcgtattatggggccacgtccgtacgacggtgatcgatccacaaggtctggccgaaaccaacgactttggaccgggcgacgtgtggtattttcctcgcggtcatgggcacatgctggaatgcctgggcgataaaccggcgcatttcattctgatcttcgataacggctacttctcagagtttggcaccttctctattactgactggatcggtcacacaccgaaagcgcttctcgccaagaactttaagctgcccgaaagcgcttttgatgggtttcccaaaaaagaggtctattttgcacgtggcgcggttccaccagccacccctgcagcgcctttacagggactgaagctgccaccactcacgcataaatacgaactcctcgaacaagaacctcataaagtttttaaaggtggtcgtgaatggcgcgtggatagcactcgttttcccatttccaagactgtaaccggcgttgttcttgatttggaacccggcgcgttacgcgagcttcactggcatcctaatgctgacgagtggcaatatgtgatcgatggcaacattagtgtgacgatgttcggttctcatggccgtgtacgcaccgaacagatggagaagggtgatgtcgggtatattccacaggggtatggccacagcatcgaaaatgttggagatcgtccttgtcgcgtcttgattggctttaacacaggtaactaccaagcgatcgacttatcacagtggattgcaggtaatcccgcggatgttcttgccacgaacttctccaaacccaccagcctctttgaaaagttcccaaaacaggacgtgtttattgctcctggcaag

SEQ ID NO: 916 - protein, 359 aa, synthetic construct
  REGION 1..359: note = Variant of oxalate decarboxylase from Gemmata sp. SH-PL17
MGDPTFMNNVPDPLLSGKDLPTFKFELEKSKGKVIGGSSGKEATVVQLPISKGIAGVSMRLEPGAMRELHWHATAAEWGFVLWGHVRTTVIDPQGLAETNDFGPGDVWYFPRGHGHMLECLGDKPAHFILIFDNGYFSEFGTFSITDWIGHTPKALLAKNFKLPESAFDGFPKKEVYFARGAVPPATPAAPLQGLKLPPLTHKYELLEQEPHKVFKGGREWRVDSTRFPISKTVTGVVLDLEPGALRELHWHPNADEWQYVIDGNISVTMFGSHGRVRTEQMEKGDVGYIPQGYGHSIENVGDRPCRVLIGFNTGNYQAIDLSQWIAGNPADVLATNFSKPTSLFEKFPKQDVFIAPGK

SEQ ID NO: 917 - DNA, 1077 bp, synthetic construct
  misc_feature 1..1077: note = Variant of oxalate decarboxylase from Gemmata sp. SH-PL17
  source 1..1077: mol_type = other DNA
atgggtgaccctacctttatgaacaatgtaccagaccctctgctgtcgggcaaagatttgccgacgttcaagtttgagctggaaaagagcaagggcaaagtcattggggggagttcgggaaaagaagcaaccgttgtccagttacctatctccaaaggcattgctggtgtgagcatggtacttgaaccgggtgcgatgcgcgaattgcactggcatgccacagcagcagagtgggggttcgtattatggggccacgtccgtacgacggtgatcgatccacaaggtctggccgaaaccaacgactttggaccgggcgacgtgtggtattttcctcgcggtcatgggcacatgctggaatgcctgggcgataaaccggcgcatttcattctgatcttcgataacggctacttctcagagtttggcaccttctctattactgactggatcggtcacacaccgaaagcgcttctcgccaagaactttaagctgcccgaaagcgcttttgatgggtttcccaaaaaagaggtctattttgcacgtggcgcggttccaccagccacccctgcagcgcctttacagggactgaagctgccaccactcacgcataaatacgaactcctcgaacaagaacctcataaagtttttaaaggtggtcgtgaatggcgcgtggatagcactcgttttcccatttccaagactgtaaccggcgttgttcttgatttggaacccggcgcgttacgcgagcttcactggcatcctaatgctgacgagtggcaatatgtgatcgatggcaacattagtgtgacgatgttcggttctcatggccgtgtacgcaccgaacagatggagaagggtgatgtcgggtatattccacaggggtatggccacagcatcgaaaatgttggagatcgtccttgtcgcgtcttgattggctttaacacaggtaactacgatgcgatcgacttatcacagtggattgcaggtaatcccgcggatgttcttgccacgaacttctccaaacccaccagcctctttgaaaagttcccaaaacaggacgtgtttattgctcctggcaag

SEQ ID NO: 918 - protein, 359 aa, synthetic construct
  REGION 1..359: note = Variant of oxalate decarboxylase from Gemmata sp. SH-PL17
MGDPTFMNNVPDPLLSGKDLPTFKFELEKSKGKVIGGSSGKEATVVQLPISKGIAGVSMVLEPGAMRELHWHATAAEWGFVLWGHVRTTVIDPQGLAETNDFGPGDVWYFPRGHGHMLECLGDKPAHFILIFDNGYFSEFGTFSITDWIGHTPKALLAKNFKLPESAFDGFPKKEVYFARGAVPPATPAAPLQGLKLPPLTHKYELLEQEPHKVFKGGREWRVDSTRFPISKTVTGVVLDLEPGALRELHWHPNADEWQYVIDGNISVTMFGSHGRVRTEQMEKGDVGYIPQGYGHSIENVGDRPCRVLIGFNTGNYDAIDLSQWIAGNPADVLATNFSKPTSLFEKFPKQDVFIAPGK

SEQ ID NO: 919 - DNA, 1077 bp, synthetic construct
  misc_feature 1..1077: note = Variant of oxalate decarboxylase from Gemmata sp. SH-PL17
  source 1..1077: mol_type = other DNA
atgggtgaccctacctttatgaacaatgtaccagaccctctgctgtcgggcaaagatttgccgacgttcaagtttgggctggaaaagagcaagggcaaagtcattggggggagttcgggaaaagaagcaaccgttgtccagttacctatctccaaaggcattgctggtgtgagcatggtacttgaaccgggtgcgatgcgcgaattgcactggcatgccacagcagcagagtgggggttcgtattatggggccacgtccgtacgacggtgatcgatccacaaggtctggccgaaaccaacgactttggaccgggcgacgtgtggtattttcctcgcggtcatgggcacatgctggaatgcctgggcgataaaccggcgcatttcattctgatcttcgataacggctacttctcagagtttggcaccttctctattactgactggatcggtcacacaccgaaagcgcttctcgccaagaactttaagctgcccgaaagcgcttttgatgggtttcccaaaaaagaggtctattttgcacgtggcgcggttccaccagccacccctgcagcgcctttacagggactgaagctgccaccactcacgcataaatacgaactcctcgaacaagaacctcataaagtttttaaaggtggtcgtgaatggcgcgtggatagcactcgttttcccatttccaagactgtaaccggcgttgttcttgatttggaacccggcgcgttacgcgagcttcactggcatcctaatgctgacgagtggcaatatgtgatcgatggcaacattagtgtgacgatgttcggttctcatggccgtgtacgcaccgaacagatggagaagggtgatgtcgggtatattccacaggggtatggccacagcatcgaaaatgttggagatcgtccttgtcgcgtcttgattggctttaacacaggtaactaccaagcgatcgacttatcacagtggattgcaggtaatcccgcggatgttcttgccacgaacttctccaaacccaccagcctctttgaaaagttcccaaaacaggacgtgtttattgctcctggcaag

SEQ ID NO: 920 - protein, 359 aa, synthetic construct
  REGION 1..359: note = Variant of oxalate decarboxylase from Gemmata sp. SH-PL17
MGDPTFMNNVPDPLLSGKDLPTFKFGLEKSKGKVIGGSSGKEATVVQLPISKGIAGVSMVLEPGAMRELHWHATAAEWGFVLWGHVRTTVIDPQGLAETNDFGPGDVWYFPRGHGHMLECLGDKPAHFILIFDNGYFSEFGTFSITDWIGHTPKALLAKNFKLPESAFDGFPKKEVYFARGAVPPATPAAPLQGLKLPPLTHKYELLEQEPHKVFKGGREWRVDSTRFPISKTVTGVVLDLEPGALRELHWHPNADEWQYVIDGNISVTMFGSHGRVRTEQMEKGDVGYIPQGYGHSIENVGDRPCRVLIGFNTGNYQAIDLSQWIAGNPADVLATNFSKPTSLFEKFPKQDVFIAPGK

SEQ ID NO: 921 - DNA, 1077 bp, synthetic construct
  misc_feature 1..1077: note = Variant of oxalate decarboxylase from Gemmata sp. SH-PL17
  source 1..1077: mol_type = other DNA
atgggtgaccctacctttatgaacaatgtaccagaccctctgctgtcgggcaaagatttgccgacgttcaagtttgagctggaaaagagcaagggcaaagtcattggggggagttcgggaaaagaagcaaccgttgtccagttacctatctccaaaggcattgctggtgtgagcatggtacttgaaccgggtgcgatgcgcgaattgcactggcatgccacagcagcagagtgggggttcgtattatggggccacgtccgtacgacggtgatcgatccacaaggtctggccgaaaccaacgactttggaccgggcgacgtgtggtattttcctcgcggtcatgggcacatgctggaatgcctgggcgataaaccggcgcatttcattctgatcttcgataacggctacttctcagagtttggcaccttctctattactgactggatcggtcacacaccgaaagcgcttctcgccaagaactttaagctgcccgaaagcgcttttgatgggtttcccaaaaaagaggtctattttgcacgtggcgcggttccaccagccacccctgcagcgcctttacagggactgaagctgccaccactcacgcataaatacgaactcctcgaacaaaggcctcataaagtttttaaaggtggtcgtgaatggcgcgtggatagcactcgttttcccatttccaagactgtaaccggcgttgttcttgatttggaacccggcgcgttacgcgagcttcactggcatcctaatgctgacgagtggcaatatgtgatcgatggcaacattagtgtgacgatgttcggttctcatggccgtgtacgcaccgaacagatggagaagggtgatgtcgggtatattccacaggggtatggccacagcatcgaaaatgttggagatcgtccttgtcgcgtcttgattggctttaacacaggtaactaccaagcgatcgacttatcacagtggattgcaggtaatcccgcggatgttcttgccacgaacttctccaaacccaccagcctctttgaaaagttcccaaaacaggacgtgtttattgctcctggcaag

SEQ ID NO: 922 - protein, 359 aa, synthetic construct
  REGION 1..359: note = Variant of oxalate decarboxylase from Gemmata sp. SH-PL17
MGDPTFMNNVPDPLLSGKDLPTFKFELEKSKGKVIGGSSGKEATVVQLPISKGIAGVSMVLEPGAMRELHWHATAAEWGFVLWGHVRTTVIDPQGLAETNDFGPGDVWYFPRGHGHMLECLGDKPAHFILIFDNGYFSEFGTFSITDWIGHTPKALLAKNFKLPESAFDGFPKKEVYFARGAVPPATPAAPLQGLKLPPLTHKYELLEQRPHKVFKGGREWRVDSTRFPISKTVTGVVLDLEPGALRELHWHPNADEWQYVIDGNISVTMFGSHGRVRTEQMEKGDVGYIPQGYGHSIENVGDRPCRVLIGFNTGNYQAIDLSQWIAGNPADVLATNFSKPTSLFEKFPKQDVFIAPGK

SEQ ID NO: 923 - DNA, 1077 bp, synthetic construct
  misc_feature 1..1077: note = Variant of oxalate decarboxylase from Gemmata sp. SH-PL17
  source 1..1077: mol_type = other DNA
atgggtgaccctacctttatgaacaatgtaccagaccctctgctgtcgggcaaagatttgccgacgttcaagtttgagctggaaaagagcaggggcaaagtcattggggggagttcgggaaaagaagcaaccgttgtccagttacctatctccaaaggcattgctggtgtgagcatggtacttgaaccgggtgcgatgcgcgaattgcactggcatgccacagcagcagagtgggggttcgtattatggggccacgtccgtacgacggtgatcgatccacaaggtctggccgaaaccaacgactttggaccgggcgacgtgtggtattttcctcgcggtcatgggcacatgctggaatgcctgggcgataaaccggcgcatttcattctgatcttcgataacggctacttctcagagtttggcaccttctctattactgactggatcggtcacacaccgaaagcgcttctcgccaagaactttaagctgcccgaaagcgcttttgatgggtttcccaaaaaagaggtctattttgcacgtggcgcggttccaccagccacccctgcagcgcctttacagggactgaagctgccaccactcacgcataaatacgaactcctcgaacaagaacctcataaagtttttaaaggtggtcgtgaatggcgcgtggatagcactcgttttcccatttccaagactgtaaccggcgttgttcttgatttggaacccggcgcgttacgcgagcttcactggcatcctaatgctgacgagtggcaatatgtgatcgatggcaacattagtgtgacgatgttcggttctcatggccgtgtacgcaccgaacagatggagaagggtgatgtcgggtatattccacaggggtatggccacagcatcgaaaatgttggagatcgtccttgtcgcgtcttgattggctttaacacaggtaactaccaagcgatcgacttatcacagtggattgcaggtaatcccgcggatgttcttgccacgaacttctccaaacccaccagcctctttgaaaagttcccaaaacaggacgtgtttattgctcctggcaag

SEQ ID NO: 924 - protein, 359 aa, synthetic construct
  REGION 1..359: note = Variant of oxalate decarboxylase from Gemmata sp. SH-PL17
MGDPTFMNNVPDPLLSGKDLPTFKFELEKSRGKVIGGSSGKEATVVQLPISKGIAGVSMVLEPGAMRELHWHATAAEWGFVLWGHVRTTVIDPQGLAETNDFGPGDVWYFPRGHGHMLECLGDKPAHFILIFDNGYFSEFGTFSITDWIGHTPKALLAKNFKLPESAFDGFPKKEVYFARGAVPPATPAAPLQGLKLPPLTHKYELLEQEPHKVFKGGREWRVDSTRFPISKTVTGVVLDLEPGALRELHWHPNADEWQYVIDGNISVTMFGSHGRVRTEQMEKGDVGYIPQGYGHSIENVGDRPCRVLIGFNTGNYQAIDLSQWIAGNPADVLATNFSKPTSLFEKFPKQDVFIAPGK

SEQ ID NO: 925 - DNA, 1077 bp, synthetic construct
  misc_feature 1..1077: note = Variant of oxalate decarboxylase from Gemmata sp. SH-PL17
  source 1..1077: mol_type = other DNA
atgggtgaccctacctttatgaacaatgtaccagaccctctgctgtcgggcaaagatttgccgacgttcaagtttgagctggaaaagagcaagggcaaagtcattggggggagttcgggaaaagaagcaaccgttgtccagttacctatctccaaaggcattgctggtgtgagcatggtacttgaaccgggtgcgatgcgcgaattgcactggcatgccacagcagcagagtgggggttcgtattatggggccacgtccgtacgacggtgatcgatccacaaggtctggccgaaaccaacgactttggaccgggcgacgtgtggtattttcctcgcggtcatgggcacatgctggaatgcctgggcgataaaccggcgcatttcattctgatcttcgataacggctacttctcagagtttggcaccttctctattactgactggatcggtcacacaccgaaagcgcttctcgccaagaactttaagctgcccgaaagcgcttttgatgggtttcccaaaaaagaggtctattttgcacgtggcgcggttccaccagccacccctgcagcgcctttacagggactgaagctgccaccactcacgcataaatacgaactcctcgaacaagaacctcataaagtttttaaaggtggtcgtgaatggcgcgtggatagcactcgttttcccatttccaagactgtaaccggcgttgttcttgatttggaacccggcgcgttacgcgagcttcactggcatcctaatgctgacgagtggcaatatgtgatcgatggcaacattagtgtgacgatgttcggttctcatggccgttttcgcaccgaacagatggagaagggtgatgtcgggtatattccacaggggtatggccacagcatcgaaaatgttggagatcgtccttgtcgcgtcttgattggctttaacacaggtaactaccaagcgatcgacttatcacagtggattgcaggtaatcccgcggatgttcttgccacgaacttctccaaacccaccagcctctttgaaaagttcccaaaacaggacgtgtttattgctcctggcaag

SEQ ID NO: 926 - protein, 359 aa, synthetic construct
  REGION 1..359: note = Variant of oxalate decarboxylase from Gemmata sp. SH-PL17
MGDPTFMNNVPDPLLSGKDLPTFKFELEKSKGKVIGGSSGKEATVVQLPISKGIAGVSMVLEPGAMRELHWHATAAEWGFVLWGHVRTTVIDPQGLAETNDFGPGDVWYFPRGHGHMLECLGDKPAHFILIFDNGYFSEFGTFSITDWIGHTPKALLAKNFKLPESAFDGFPKKEVYFARGAVPPATPAAPLQGLKLPPLTHKYELLEQEPHKVFKGGREWRVDSTRFPISKTVTGVVLDLEPGALRELHWHPNADEWQYVIDGNISVTMFGSHGRFRTEQMEKGDVGYIPQGYGHSIENVGDRPCRVLIGFNTGNYQAIDLSQWIAGNPADVLATNFSKPTSLFEKFPKQDVFIAPGK

SEQ ID NO: 927 - DNA, 1077 bp, synthetic construct
  misc_feature 1..1077: note = Variant of oxalate decarboxylase from Gemmata sp. SH-PL17
  source 1..1077: mol_type = other DNA
atgggtgaccctacctttatgaacaatgtaccagaccctctgctgtcgggcaaagatttgccgacgttcaagtttgagctggaaaagagcaagggcaaagtcattgggatgagttcgggaaaagaagcaaccgttgtccagttacctatctccaaaggcattgctggtgtgagcatggtacttgaaccgggtgcgatgcgcgaattgcactggcatgccacagcagcagagtgggggttcgtattatggggccacgtccgtacgacggtgatcgatccacaaggtctggccgaaaccaacgactttggaccgggcgacgtgtggtattttcctcgcggtcatgggcacatgctggaatgcctgggcgataaaccggcgcatttcattctgatcttcgataacggctacttctcagagtttggcaccttctctattactgactggatcggtcacacaccgaaagcgcttctcgccaagaactttaagctgcccgaaagcgcttttgatgggtttcccaaaaaagaggtctattttgcacgtggcgcggttccaccagccacccctgcagcgcctttacagggactgaagctgccaccactcacgcataaatacgaactcctcgaacaagaacctcataaagtttttaaaggtggtcgtgaatggcgcgtggatagcactcgttttcccatttccaagactgtaaccggcgttgttcttgatttggaacccggcgcgttacgcgagcttcactggcatcctaatgctgacgagtggcaatatgtgatcgatggcaacattagtgtgacgatgttcggttctcatggccgtgtacgcaccgaacagatggagaagggtgatgtcgggtatattccacaggggtatggccacagcatcgaaaatgttggagatcgtccttgtcgcgtcttgattggctttaacacaggtaactaccaagcgatcgacttatcacagtggattgcaggtaatcccgcggatgttcttgccacgaacttctccaaacccaccagcctctttgaaaagttcccaaaacaggacgtgtttattgctcctggcaag

SEQ ID NO: 928 - protein, 359 aa, synthetic construct
  REGION 1..359: note = Variant of oxalate decarboxylase from Gemmata sp. SH-PL17
MGDPTFMNNVPDPLLSGKDLPTFKFELEKSKGKVIGMSSGKEATVVQLPISKGIAGVSMVLEPGAMRELHWHATAAEWGFVLWGHVRTTVIDPQGLAETNDFGPGDVWYFPRGHGHMLECLGDKPAHFILIFDNGYFSEFGTFSITDWIGHTPKALLAKNFKLPESAFDGFPKKEVYFARGAVPPATPAAPLQGLKLPPLTHKYELLEQEPHKVFKGGREWRVDSTRFPISKTVTGVVLDLEPGALRELHWHPNADEWQYVIDGNISVTMFGSHGRVRTEQMEKGDVGYIPQGYGHSIENVGDRPCRVLIGFNTGNYQAIDLSQWIAGNPADVLATNFSKPTSLFEKFPKQDVFIAPGK

SEQ ID NO: 929 - DNA, 1077 bp, synthetic construct
  misc_feature 1..1077: note = Variant of oxalate decarboxylase from Gemmata sp. SH-PL17
  source 1..1077: mol_type = other DNA
atgggtgaccctacctttatgaacaatgtaccagaccctctgctgtcgggcaaagatttgccgacgttcaagtttgagctggaaaagagcaagggcaaagtcattggggggagttcgggaaaagaagcaaccgttgtccagttacctatctccaaaggcattgctggtgtgagcatggtacttgaaccgggtgcgatgcgcgaattgcactggcatgccacagcagcagagtgggggttcgtattatggggccacgtccgtacgacggtgatcgatccacaaggtccggccgaaaccaacgactttggaccgggcgacgtgtggtattttcctcgcggtcatgggcacatgctggaatgcctgggcgataaaccggcgcatttcattctgatcttcgataacggctacttctcagagtttggcaccttctctattactgactggatcggtcacacaccgaaagcgcttctcgccaagaactttaagctgcccgaaagcgcttttgatgggtttcccaaaaaagaggtctattttgcacgtggcgcggttccaccagccacccctgcagcgcctttacagggactgaagctgccaccactcacgcataaatacgaactcctcgaacaagaacctcataaagtttttaaaggtggtcgtgaatggcgcgtggatagcactcgttttcccatttccaagactgtaaccggcgttgttcttgatttggaacccggcgcgttacgcgagcttcactggcatcctaatgctgacgagtggcaatatgtgatcgatggcaacattagtgtgacgatgttcggttctcatggccgtgtacgcaccgaacagatggagaagggtgatgtcgggtatattccacaggggtatggccacagcatcgaaaatgttggagatcgtccttgtcgcgtcttgattggctttaacacaggtaactaccaagcgatcgacttatcacagtggattgcaggtaatcccgcggatgttcttgccacgaacttctccaaacccaccagcctctttgaaaagttcccaaaacaggacgtgtttattgctcctggcaag

SEQ ID NO: 930 - protein, 359 aa, synthetic construct
  REGION 1..359: note = Variant of oxalate decarboxylase from Gemmata sp. SH-PL17
MGDPTFMNNVPDPLLSGKDLPTFKFELEKSKGKVIGGSSGKEATVVQLPISKGIAGVSMVLEPGAMRELHWHATAAEWGFVLWGHVRTTVIDPQGPAETNDFGPGDVWYFPRGHGHMLECLGDKPAHFILIFDNGYFSEFGTFSITDWIGHTPKALLAKNFKLPESAFDGFPKKEVYFARGAVPPATPAAPLQGLKLPPLTHKYELLEQEPHKVFKGGREWRVDSTRFPISKTVTGVVLDLEPGALRELHWHPNADEWQYVIDGNISVTMFGSHGRVRTEQMEKGDVGYIPQGYGHSIENVGDRPCRVLIGFNTGNYQAIDLSQWIAGNPADVLATNFSKPTSLFEKFPKQDVFIAPGK

SEQ ID NO: 931 - DNA, 1077 bp, synthetic construct
  misc_feature 1..1077: note = Variant of oxalate decarboxylase from Gemmata sp. SH-PL17
  source 1..1077: mol_type = other DNA
atgggtgaccctacctttatgaacaatgtaccagaccctctgctggtgggcaaagatttgccgacgttcaagtttgagctggaaaagagcaagggcaaagtcattggggggagttcgggaaaagaagcaaccgttgtccagttacctatctccaaaggcattgctggtgtgagcatggtacttgaaccgggtgcgatgcgcgaattgcactggcatgccacagcagcagagtgggggttcgtattatggggccacgtccgtacgacggtgatcgatccacaaggtctggccgaaaccaacgactttggaccgggcgacgtgtggtattttcctcgcggtcatgggcacatgctggaatgcctgggcgataaaccggcgcatttcattctgatcttcgataacggctacttctcagagtttggcaccttctctattactgactggatcggtcacacaccgaaagcgcttctcgccaagaactttaagctgcccgaaagcgcttttgatgggtttcccaaaaaagaggtctattttgcacgtggcgcggttccaccagccacccctgcagcgcctttacagggactgaagctgccaccactcacgcataaatacgaactcctcgaacaagaacctcataaagtttttaaaggtggtcgtgaatggcgcgtggatagcactcgttttcccatttccaagactgtaaccggcgttgttcttgatttggaacccggcgcgttacgcgagcttcactggcatcctaatgctgacgagtggcaatatgtgatcgatggcaacattagtgtgacgatgttcggttctcatggccgtgtacgcaccgaacagatggagaagggtgatgtcgggtatattccacaggggtatggccacagcatcgaaaatgttggagatcgtccttgtcgcgtcttgattggctttaacacaggtaactaccaagcgatcgacttatcacagtggattgcaggtaatcccgcggatgttcttgccacgaacttctccaaacccaccagcctctttgaaaagttcccaaaacaggacgtgtttattgctcctggcaag

SEQ ID NO: 932 - protein, 359 aa, synthetic construct
  REGION 1..359: note = Variant of oxalate decarboxylase from Gemmata sp. SH-PL17
MGDPTFMNNVPDPLLVGKDLPTFKFELEKSKGKVIGGSSGKEATVVQLPISKGIAGVSMVLEPGAMRELHWHATAAEWGFVLWGHVRTTVIDPQGLAETNDFGPGDVWYFPRGHGHMLECLGDKPAHFILIFDNGYFSEFGTFSITDWIGHTPKALLAKNFKLPESAFDGFPKKEVYFARGAVPPATPAAPLQGLKLPPLTHKYELLEQEPHKVFKGGREWRVDSTRFPISKTVTGVVLDLEPGALRELHWHPNADEWQYVIDGNISVTMFGSHGRVRTEQMEKGDVGYIPQGYGHSIENVGDRPCRVLIGFNTGNYQAIDLSQWIAGNPADVLATNFSKPTSLFEKFPKQDVFIAPGK

SEQ ID NO: 933 - DNA, 1077 bp, synthetic construct
  misc_feature 1..1077: note = Variant of oxalate decarboxylase from Gemmata sp. SH-PL17
  source 1..1077: mol_type = other DNA
atgggtgaccctacctttatgaacaatgtaccagaccctctgctgtcgggcaaagatttgccgacgttcaagtttgagctggaaaagagcaagggcaaagtcattggggggagttcgggaaaagaagcaaccgttgtccagttacctatctccaaaggcattgctggtgtgagcatggctcttgaaccgggtgcgatgcgcgaattgcactggcatgccacagcagcagagtgggggttcgtattatggggccacgtccgtacgacggtgatcgatccacaaggtctggccgaaaccaacgactttggaccgggcgacgtgtggtattttcctcgcggtcatgggcacatgctggaatgcctgggcgataaaccggcgcatttcattctgatcttcgataacggctacttctcagagtttggcaccttctctattactgactggatcggtcacacaccgaaagcgcttctcgccaagaactttaagctgcccgaaagcgcttttgatgggtttcccaaaaaagaggtctattttgcacgtggcgcggttccaccagccacccctgcagcgcctttacagggactgaagctgccaccactcacgcataaatacgaactcctcgaacaagaacctcataaagtttttaaaggtggtcgtgaatggcgcgtggatagcactcgttttcccatttccaagactgtaaccggcgttgttcttgatttggaacccggcgcgttacgcgagcttcactggcatcctaatgctgacgagtggcaatatgtgatcgatggcaacattagtgtgacgatgttcggttctcatggccgtgtacgcaccgaacagatggagaagggtgatgtcgggtatattccacaggggtatggccacagcatcgaaaatgttggagatcgtccttgtcgcgtcttgattggctttaacacaggtaactaccaagcgatcgacttatcacagtggattgcaggtaatcccgcggatgttcttgccacgaacttctccaaacccaccagcctctttgaaaagttcccaaaacaggacgtgtttattgctcctggcaag

SEQ ID NO: 934 - protein, 359 aa, synthetic construct
  REGION 1..359: note = Variant of oxalate decarboxylase from Gemmata sp. SH-PL17
MGDPTFMNNVPDPLLSGKDLPTFKFELEKSKGKVIGGSSGKEATVVQLPISKGIAGVSMALEPGAMRELHWHATAAEWGFVLWGHVRTTVIDPQGLAETNDFGPGDVWYFPRGHGHMLECLGDKPAHFILIFDNGYFSEFGTFSITDWIGHTPKALLAKNFKLPESAFDGFPKKEVYFARGAVPPATPAAPLQGLKLPPLTHKYELLEQEPHKVFKGGREWRVDSTRFPISKTVTGVVLDLEPGALRELHWHPNADEWQYVIDGNISVTMFGSHGRVRTEQMEKGDVGYIPQGYGHSIENVGDRPCRVLIGFNTGNYQAIDLSQWIAGNPADVLATNFSKPTSLFEKFPKQDVFIAPGK

SEQ ID NO: 935 - DNA, 1077 bp, synthetic construct
  misc_feature 1..1077: note = Variant of oxalate decarboxylase from Gemmata sp. SH-PL17
  source 1..1077: mol_type = other DNA
atgggtgaccctacctttatgaacaatgtaccagaccctctgctgtcgggcaaagatttgccgacgttcaagtttcggctggaaaagagcaagggcaaagtcattggggggagttcgggaaaagaagcaaccgttgtccagttacctatctccaaaggcattgctggtgtgagcatggtacttgaaccgggtgcgatgcgcgaattgcactggcatgccacagcagcagagtgggggttcgtattatggggccacgtccgtacgacggtgatcgatccacaaggtctggccgaaaccaacgactttggaccgggcgacgtgtggtattttcctcgcggtcatgggcacatgctggaatgcctgggcgataaaccggcgcatttcattctgatcttcgataacggctacttctcagagtttggcaccttctctattactgactggatcggtcacacaccgaaagcgcttctcgccaagaactttaagctgcccgaaagcgcttttgatgggtttcccaaaaaagaggtctattttgcacgtggcgcggttccaccagccacccctgcagcgcctttacagggactgaagctgccaccactcacgcataaatacgaactcctcgaacaagaacctcataaagtttttaaaggtggtcgtgaatggcgcgtggatagcactcgttttcccatttccaagactgtaaccggcgttgttcttgatttggaacccggcgcgttacgcgagcttcactggcatcctaatgctgacgagtggcaatatgtgatcgatggcaacattagtgtgacgatgttcggttctcatggccgtgtacgcaccgaacagatggagaagggtgatgtcgggtatattccacaggggtatggccacagcatcgaaaatgttggagatcgtccttgtcgcgtcttgattggctttaacacaggtaactaccaagcgatcgacttatcacagtggattgcaggtaatcccgcggatgttcttgccacgaacttctccaaacccaccagcctctttgaaaagttcccaaaacaggacgtgtttattgctcctggcaag

SEQ ID NO: 936 - protein, 359 aa, synthetic construct
  REGION 1..359: note = Variant of oxalate decarboxylase from Gemmata sp. SH-PL17
MGDPTFMNNVPDPLLSGKDLPTFKFRLEKSKGKVIGGSSGKEATVVQLPISKGIAGVSMVLEPGAMRELHWHATAAEWGFVLWGHVRTTVIDPQGLAETNDFGPGDVWYFPRGHGHMLECLGDKPAHFILIFDNGYFSEFGTFSITDWIGHTPKALLAKNFKLPESAFDGFPKKEVYFARGAVPPATPAAPLQGLKLPPLTHKYELLEQEPHKVFKGGREWRVDSTRFPISKTVTGVVLDLEPGALRELHWHPNADEWQYVIDGNISVTMFGSHGRVRTEQMEKGDVGYIPQGYGHSIENVGDRPCRVLIGFNTGNYQAIDLSQWIAGNPADVLATNFSKPTSLFEKFPKQDVFIAPGK

SEQ ID NO: 937 - DNA, 1077 bp, synthetic construct
  misc_feature 1..1077: note = Variant of oxalate decarboxylase from Gemmata sp. SH-PL17
  source 1..1077: mol_type = other DNA
atgggtgaccctacctttatgaacaatgtaccagaccctctgctgtcgggcaaagatttgccgacgttcaagtttgagctggaaaagagcgggggcaaagtcattggggggagttcgggaaaagaagcaaccgttgtccagttacctatctccaaaggcattgctggtgtgagcatggtacttgaaccgggtgcgatgcgcgaattgcactggcatgccacagcagcagagtgggggttcgtattatggggccacgtccgtacgacggtgatcgatccacaaggtctggccgaaaccaacgactttggaccgggcgacgtgtggtattttcctcgcggtcatgggcacatgctggaatgcctgggcgataaaccggcgcatttcattctgatcttcgataacggctacttctcagagtttggcaccttctctattactgactggatcggtcacacaccgaaagcgcttctcgccaagaactttaagctgcccgaaagcgcttttgatgggtttcccaaaaaagaggtctattttgcacgtggcgcggttccaccagccacccctgcagcgcctttacagggactgaagctgccaccactcacgcataaatacgaactcctcgaacaagaacctcataaagtttttaaaggtggtcgtgaatggcgcgtggatagcactcgttttcccatttccaagactgtaaccggcgttgttcttgatttggaacccggcgcgttacgcgagcttcactggcatcctaatgctgacgagtggcaatatgtgatcgatggcaacattagtgtgacgatgttcggttctcatggccgtgtacgcaccgaacagatggagaagggtgatgtcgggtatattccacaggggtatggccacagcatcgaaaatgttggagatcgtccttgtcgcgtcttgattggctttaacacaggtaactaccaagcgatcgacttatcacagtggattgcaggtaatcccgcggatgttcttgccacgaacttctccaaacccaccagcctctttgaaaagttcccaaaacaggacgtgtttattgctcctggcaag

SEQ ID NO: 938 - protein, 359 aa, synthetic construct
  REGION 1..359: note = Variant of oxalate decarboxylase from Gemmata sp. SH-PL17
MGDPTFMNNVPDPLLSGKDLPTFKFELEKSGGKVIGGSSGKEATVVQLPISKGIAGVSMVLEPGAMRELHWHATAAEWGFVLWGHVRTTVIDPQGLAETNDFGPGDVWYFPRGHGHMLECLGDKPAHFILIFDNGYFSEFGTFSITDWIGHTPKALLAKNFKLPESAFDGFPKKEVYFARGAVPPATPAAPLQGLKLPPLTHKYELLEQEPHKVFKGGREWRVDSTRFPISKTVTGVVLDLEPGALRELHWHPNADEWQYVIDGNISVTMFGSHGRVRTEQMEKGDVGYIPQGYGHSIENVGDRPCRVLIGFNTGNYQAIDLSQWIAGNPADVLATNFSKPTSLFEKFPKQDVFIAPGK

SEQ ID NO: 939 - DNA, 1077 bp, synthetic construct
  misc_feature 1..1077: note = Variant of oxalate decarboxylase from Gemmata sp. SH-PL17
  source 1..1077: mol_type = other DNA
atgggtgaccctacctttatgaacaatgtaccagaccctctgctgtcgggcaaagatttgccgacgttcaagtttgagctggaaaagagcaagggcaaagtcattggggggagttcgggaaaagaagcaaccgttgtccagttacctatctccaaaggcattgctggtgtgagcatggtacttgaaccgggtgcgatgcgcgaattgcactggcatgccacagcagcagagtgggggttcgtattatggggccacgtccgtacgacggtgatcgatccacaaggtctggccgaaaccaacgactttggaccgggcgacgtgtggtattttcctcgcggtcatgggcacatgctggaatgcctgggcgataaaccggcgcatttcattctgatcttcgataacggctacttctcagagtttggcaccttctctattactgactggatcggtcacacaccgaaagcgcttctcgccaagaactttaagctgcccgaaagcgcttttgatgggtttcccaaaaaagaggtctattttgcacgtggcgcggttccaccagccacccctgcagcgcctttacagggaggtaagctgccaccactcacgcataaatacgaactcctcgaacaagaacctcataaagtttttaaaggtggtcgtgaatggcgcgtggatagcactcgttttcccatttccaagactgtaaccggcgttgttcttgatttggaacccggcgcgttacgcgagcttcactggcatcctaatgctgacgagtggcaatatgtgatcgatggcaacattagtgtgacgatgttcggttctcatggccgtgtacgcaccgaacagatggagaagggtgatgtcgggtatattccacaggggtatggccacagcatcgaaaatgttggagatcgtccttgtcgcgtcttgattggctttaacacaggtaactaccaagcgatcgacttatcacagtggattgcaggtaatcccgcggatgttcttgccacgaacttctccaaacccaccagcctctttgaaaagttcccaaaacaggacgtgtttattgctcctggcaag

SEQ ID NO: 940 - protein, 359 aa, synthetic construct
  REGION 1..359: note = Variant of oxalate decarboxylase from Gemmata sp. SH-PL17
MGDPTFMNNVPDPLLSGKDLPTFKFELEKSKGKVIGGSSGKEATVVQLPISKGIAGVSMVLEPGAMRELHWHATAAEWGFVLWGHVRTTVIDPQGLAETNDFGPGDVWYFPRGHGHMLECLGDKPAHFILIFDNGYFSEFGTFSITDWIGHTPKALLAKNFKLPESAFDGFPKKEVYFARGAVPPATPAAPLQGGKLPPLTHKYELLEQEPHKVFKGGREWRVDSTRFPISKTVTGVVLDLEPGALRELHWHPNADEWQYVIDGNISVTMFGSHGRVRTEQMEKGDVGYIPQGYGHSIENVGDRPCRVLIGFNTGNYQAIDLSQWIAGNPADVLATNFSKPTSLFEKFPKQDVFIAPGK

SEQ ID NO: 941 - DNA, 1077 bp, synthetic construct
  misc_feature 1..1077: note = Variant of oxalate decarboxylase from Gemmata sp. SH-PL17
  source 1..1077: mol_type = other DNA
atgggtgaccctacctttatgaacaatgtaccagaccctctgctgtcgggcaaagatttgccgacgttcaagtttgagctggaaaagagcaagggcaaagtcattggggggagttcgggaaaagaagcaaccgttgtccagttacctatctccaaaggcattgctggtgtgagcatggtacttgaaccgggtgcgatgcgcgaattgcactggcatgccacagcagcagagtgggggttcgtattatggggccacgtccgtacgacggtgatcgatccacaaggtctggccgaaaccaacgactttggaccgggcgacgtgtggtattttcctcgcggtcatgggcacatgctggaatgcctgggcgataaaccggcgcatttcattctgatcttcgataacggctacttctcagagtttggcaccttctctattactgactggatcggtcacacaccgaaagcgcttctcgccaagaactttaagctgcccgaaagcgcttttgatgggtttcccaaaaaagaggtctattttgcacgtggcgcggttccaccagccacccctgcagcgcctttacagggactgaagctgccaccactcacgcataaatacgaactcctcgaacaagaacctcataaagtttttaaaggtggtcgtgaatggcgcgtggatagcactcgttttcccatttccaagactgtaaccggcgttgttcttgatttggaacccggcgcgttacgcgagcttcactggcatcctaatgctgacgagtggcaatatgtgatcgatggcaacattagtgtgacgatgttcggttctcatggccgtgtacgcaccgaacagatggagaagggtgatgtcgggtatattccacaggggtatggccacagcatcgaaaatgttggagatcgtccttgtcgcgtcttgattggctttaacacaggtaactacagggcgatcgacttatcacagtggattgcaggtaatcccgcggatgttcttgccacgaacttctccaaacccaccagcctctttgaaaagttcccaaaacaggacgtgtttattgctcctggcaag

SEQ ID NO: 942 - protein, 359 aa, synthetic construct
  REGION 1..359: note = Variant of oxalate decarboxylase from Gemmata sp. SH-PL17
MGDPTFMNNVPDPLLSGKDLPTFKFELEKSKGKVIGGSSGKEATVVQLPISKGIAGVSMVLEPGAMRELHWHATAAEWGFVLWGHVRTTVIDPQGLAETNDFGPGDVWYFPRGHGHMLECLGDKPAHFILIFDNGYFSEFGTFSITDWIGHTPKALLAKNFKLPESAFDGFPKKEVYFARGAVPPATPAAPLQGLKLPPLTHKYELLEQEPHKVFKGGREWRVDSTRFPISKTVTGVVLDLEPGALRELHWHPNADEWQYVIDGNISVTMFGSHGRVRTEQMEKGDVGYIPQGYGHSIENVGDRPCRVLIGFNTGNYRAIDLSQWIAGNPADVLATNFSKPTSLFEKFPKQDVFIAPGK

SEQ ID NO: 943 - DNA, 1077 bp, synthetic construct
  misc_feature 1..1077: note = Variant of oxalate decarboxylase from Gemmata sp. SH-PL17
  source 1..1077: mol_type = other DNA
atgggtgaccctacctttatgaacaatgtaccagaccctctgctgtcgggcaaagatttgccgacgttcaagtttgtgctggaaaagagcaagggcaaagtcattggggggagttcgggaaaagaagcaaccgttgtccagttacctatctccaaaggcattgctggtgtgagcatggtacttgaaccgggtgcgatgcgcgaattgcactggcatgccacagcagcagagtgggggttcgtattatggggccacgtccgtacgacggtgatcgatccacaaggtctggccgaaaccaacgactttggaccgggcgacgtgtggtattttcctcgcggtcatgggcacatgctggaatgcctgggcgataaaccggcgcatttcattctgatcttcgataacggctacttctcagagtttggcaccttctctattactgactggatcggtcacacaccgaaagcgcttctcgccaagaactttaagctgcccgaaagcgcttttgatgggtttcccaaaaaagaggtctattttgcacgtggcgcggttccaccagccacccctgcagcgcctttacagggactgaagctgccaccactcacgcataaatacgaactcctcgaacaagaacctcataaagtttttaaaggtggtcgtgaatggcgcgtggatagcactcgttttcccatttccaagactgtaaccggcgttgttcttgatttggaacccggcgcgttacgcgagcttcactggcatcctaatgctgacgagtggcaatatgtgatcgatggcaacattagtgtgacgatgttcggttctcatggccgtgtacgcaccgaacagatggagaagggtgatgtcgggtatattccacaggggtatggccacagcatcgaaaatgttggagatcgtccttgtcgcgtcttgattggctttaacacaggtaactaccaagcgatcgacttatcacagtggattgcaggtaatcccgcggatgttcttgccacgaacttctccaaacccaccagcctctttgaaaagttcccaaaacaggacgtgtttattgctcctggcaag

SEQ ID NO: 944 - protein, 359 aa, synthetic construct
  REGION 1..359: note = Variant of oxalate decarboxylase from Gemmata sp. SH-PL17
MGDPTFMNNVPDPLLSGKDLPTFKFVLEKSKGKVIGGSSGKEATVVQLPISKGIAGVSMVLEPGAMRELHWHATAAEWGFVLWGHVRTTVIDPQGLAETNDFGPGDVWYFPRGHGHMLECLGDKPAHFILIFDNGYFSEFGTFSITDWIGHTPKALLAKNFKLPESAFDGFPKKEVYFARGAVPPATPAAPLQGLKLPPLTHKYELLEQEPHKVFKGGREWRVDSTRFPISKTVTGVVLDLEPGALRELHWHPNADEWQYVIDGNISVTMFGSHGRVRTEQMEKGDVGYIPQGYGHSIENVGDRPCRVLIGFNTGNYQAIDLSQWIAGNPADVLATNFSKPTSLFEKFPKQDVFIAPGK

SEQ ID NO: 945 - DNA, 1077 bp, synthetic construct
  misc_feature 1..1077: note = Variant of oxalate decarboxylase from Gemmata sp. SH-PL17
  source 1..1077: mol_type = other DNA
atgggtgaccctacctttatgaacaatgtaccagaccctctgctgtcgggcaaagatttgccgacgttcaagtttgagctggaaaagagcaagggcaaagtcattggggggagttcgggaaaagaagcaaccgttgtccagttacctatctccaaaggcattgctggtgtgagcatggtacttgaaccgggtgcgatgcgcgaattgcactggcatgccacagcagcagagtggatgttcgtattatggggccacgtccgtacgacggtgatcgatccacaaggtctggccgaaaccaacgactttggaccgggcgacgtgtggtattttcctcgcggtcatgggcacatgctggaatgcctgggcgataaaccggcgcatttcattctgatcttcgataacggctacttctcagagtttggcaccttctctattactgactggatcggtcacacaccgaaagcgcttctcgccaagaactttaagctgcccgaaagcgcttttgatgggtttcccaaaaaagaggtctattttgcacgtggcgcggttccaccagccacccctgcagcgcctttacagggactgaagctgccaccactcacgcataaatacgaactcctcgaacaagaacctcataaagtttttaaaggtggtcgtgaatggcgcgtggatagcactcgttttcccatttccaagactgtaaccggcgttgttcttgatttggaacccggcgcgttacgcgagcttcactggcatcctaatgctgacgagtggcaatatgtgatcgatggcaacattagtgtgacgatgttcggttctcatggccgtgtacgcaccgaacagatggagaagggtgatgtcgggtatattccacaggggtatggccacagcatcgaaaatgttggagatcgtccttgtcgcgtcttgattggctttaacacaggtaactaccaagcgatcgacttatcacagtggattgcaggtaatcccgcggatgttcttgccacgaacttctccaaacccaccagcctctttgaaaagttcccaaaacaggacgtgtttattgctcctggcaag

SEQ ID NO: 946 - protein, 359 aa, synthetic construct
  REGION 1..359: note = Variant of oxalate decarboxylase from Gemmata sp. SH-PL17
MGDPTFMNNVPDPLLSGKDLPTFKFELEKSKGKVIGGSSGKEATVVQLPISKGIAGVSMVLEPGAMRELHWHATAAEWMFVLWGHVRTTVIDPQGLAETNDFGPGDVWYFPRGHGHMLECLGDKPAHFILIFDNGYFSEFGTFSITDWIGHTPKALLAKNFKLPESAFDGFPKKEVYFARGAVPPATPAAPLQGLKLPPLTHKYELLEQEPHKVFKGGREWRVDSTRFPISKTVTGVVLDLEPGALRELHWHPNADEWQYVIDGNISVTMFGSHGRVRTEQMEKGDVGYIPQGYGHSIENVGDRPCRVLIGFNTGNYQAIDLSQWIAGNPADVLATNFSKPTSLFEKFPKQDVFIAPGK

SEQ ID NO: 947 - DNA, 1077 bp, synthetic construct
  misc_feature 1..1077: note = Variant of oxalate decarboxylase from Gemmata sp. SH-PL17
  source 1..1077: mol_type = other DNA
atgggtgaccctacctttatgaacaatgtaccagaccctctgctgatgggcaaagatttgccgacgttcaagtttgagctggaaaagagcaagggcaaagtcattggggggagttcgggaaaagaagcaaccgttgtccagttacctatctccaaaggcattgctggtgtgagcatggtacttgaaccgggtgcgatgcgcgaattgcactggcatgccacagcagcagagtgggggttcgtattatggggccacgtccgtacgacggtgatcgatccacaaggtctggccgaaaccaacgactttggaccgggcgacgtgtggtattttcctcgcggtcatgggcacatgctggaatgcctgggcgataaaccggcgcatttcattctgatcttcgataacggctacttctcagagtttggcaccttctctattactgactggatcggtcacacaccgaaagcgcttctcgccaagaactttaagctgcccgaaagcgcttttgatgggtttcccaaaaaagaggtctattttgcacgtggcgcggttccaccagccacccctgcagcgcctttacagggactgaagctgccaccactcacgcataaatacgaactcctcgaacaagaacctcataaagtttttaaaggtggtcgtgaatggcgcgtggatagcactcgttttcccatttccaagactgtaaccggcgttgttcttgatttggaacccggcgcgttacgcgagcttcactggcatcctaatgctgacgagtggcaatatgtgatcgatggcaacattagtgtgacgatgttcggttctcatggccgtgtacgcaccgaacagatggagaagggtgatgtcgggtatattccacaggggtatggccacagcatcgaaaatgttggagatcgtccttgtcgcgtcttgattggctttaacacaggtaactaccaagcgatcgacttatcacagtggattgcaggtaatcccgcggatgttcttgccacgaacttctccaaacccaccagcctctttgaaaagttcccaaaacaggacgtgtttattgctcctggcaag

SEQ ID NO: 948 - protein, 359 aa, synthetic construct
  REGION 1..359: note = Variant of oxalate decarboxylase from Gemmata sp. SH-PL17
MGDPTFMNNVPDPLLMGKDLPTFKFELEKSKGKVIGGSSGKEATVVQLPISKGIAGVSMVLEPGAMRELHWHATAAEWGFVLWGHVRTTVIDPQGLAETNDFGPGDVWYFPRGHGHMLECLGDKPAHFILIFDNGYFSEFGTFSITDWIGHTPKALLAKNFKLPESAFDGFPKKEVYFARGAVPPATPAAPLQGLKLPPLTHKYELLEQEPHKVFKGGREWRVDSTRFPISKTVTGVVLDLEPGALRELHWHPNADEWQYVIDGNISVTMFGSHGRVRTEQMEKGDVGYIPQGYGHSIENVGDRPCRVLIGFNTGNYQAIDLSQWIAGNPADVLATNFSKPTSLFEKFPKQDVFIAPGK

SEQ ID NO: 949 - DNA, 1077 bp, synthetic construct
  misc_feature 1..1077: note = Variant of oxalate decarboxylase from Gemmata sp. SH-PL17
  source 1..1077: mol_type = other DNA
atgggtgaccctacctttatgaacaatgtaccagaccctctgctgtcgggcaaagatttgccgacgttcaagtttgagctggaaaagagcaagggcaaagtcattggggggagttcgggaaaagaagcaaccgttgtccagttacctatctccaaaggcattgctggtgtgagcatggtacttgaaccgggtgcgatgcgcgaattgcactggcatgccacagcagcagagtgggggttcgtattatggggccacgtccgtacgacggtgatcgatccacaaggtctggccgaaaccaacgactttggaccgggcgacgtgtggtattttcctcgcggtcatgggcacatgctggaatgcctgggcgataaaccggcgcatttcattctgatcttcgataacggctacttctcagagtttggcaccttctctattactgactggatcggtcacacaccgaaagcgcttctcgccaagaactttaagctgcccgaaagcgcttttgatgggtttcccaaaaaagaggtctattttgcacgtggcgcggttccaccagccacccctgcagcgcctttacagggactgaagctgccaccactcacgcataaatacgaactcctcgaacaagctcctcataaagtttttaaaggtggtcgtgaatggcgcgtggatagcactcgttttcccatttccaagactgtaaccggcgttgttcttgatttggaacccggcgcgttacgcgagcttcactggcatcctaatgctgacgagtggcaatatgtgatcgatggcaacattagtgtgacgatgttcggttctcatggccgtgtacgcaccgaacagatggagaagggtgatgtcgggtatattccacaggggtatggccacagcatcgaaaatgttggagatcgtccttgtcgcgtcttgattggctttaacacaggtaactaccaagcgatcgacttatcacagtggattgcaggtaatcccgcggatgttcttgccacgaacttctccaaacccaccagcctctttgaaaagttcccaaaacaggacgtgtttattgctcctggcaag

SEQ ID NO: 950 - protein, 359 aa, synthetic construct
  REGION 1..359: note = Variant of oxalate decarboxylase from Gemmata sp. SH-PL17
MGDPTFMNNVPDPLLSGKDLPTFKFELEKSKGKVIGGSSGKEATVVQLPISKGIAGVSMVLEPGAMRELHWHATAAEWGFVLWGHVRTTVIDPQGLAETNDFGPGDVWYFPRGHGHMLECLGDKPAHFILIFDNGYFSEFGTFSITDWIGHTPKALLAKNFKLPESAFDGFPKKEVYFARGAVPPATPAAPLQGLKLPPLTHKYELLEQAPHKVFKGGREWRVDSTRFPISKTVTGVVLDLEPGALRELHWHPNADEWQYVIDGNISVTMFGSHGRVRTEQMEKGDVGYIPQGYGHSIENVGDRPCRVLIGFNTGNYQAIDLSQWIAGNPADVLATNFSKPTSLFEKFPKQDVFIAPGK

SEQ ID NO: 951 - DNA, 1077 bp, synthetic construct
  misc_feature 1..1077: note = Variant of oxalate decarboxylase from Gemmata sp. SH-PL17
  source 1..1077: mol_type = other DNA
atgggtgaccctacctttatgaacaatgtaccagaccctctgctgtcgggcaaagatttgccgacgttcaagtttgagctggaaaagagcaagggcaaagtcattggggggagttcgggaaaagaagcaaccgttgtccagttacctatctccaaaggcattgctggtgtgagcatggtacttgaaccgggtgcgatgcgcgaattgcactggcatgccacagcagcagagtgggggttcgtattatggggccacgtccgtacgacggtgatcgatccacaaggtagggccgaaaccaacgactttggaccgggcgacgtgtggtattttcctcgcggtcatgggcacatgctggaatgcctgggcgataaaccggcgcatttcattctgatcttcgataacggctacttctcagagtttggcaccttctctattactgactggatcggtcacacaccgaaagcgcttctcgccaagaactttaagctgcccgaaagcgcttttgatgggtttcccaaaaaagaggtctattttgcacgtggcgcggttccaccagccacccctgcagcgcctttacagggactgaagctgccaccactcacgcataaatacgaactcctcgaacaagaacctcataaagtttttaaaggtggtcgtgaatggcgcgtggatagcactcgttttcccatttccaagactgtaaccggcgttgttcttgatttggaacccggcgcgttacgcgagcttcactggcatcctaatgctgacgagtggcaatatgtgatcgatggcaacattagtgtgacgatgttcggttctcatggccgtgtacgcaccgaacagatggagaagggtgatgtcgggtatattccacaggggtatggccacagcatcgaaaatgttggagatcgtccttgtcgcgtcttgattggctttaacacaggtaactaccaagcgatcgacttatcacagtggattgcaggtaatcccgcggatgttcttgccacgaacttctccaaacccaccagcctctttgaaaagttcccaaaacaggacgtgtttattgctcctggcaag

SEQ ID NO: 952 - protein, 359 aa, synthetic construct
  REGION 1..359: note = Variant of oxalate decarboxylase from Gemmata sp. SH-PL17
MGDPTFMNNVPDPLLSGKDLPTFKFELEKSKGKVIGGSSGKEATVVQLPISKGIAGVSMVLEPGAMRELHWHATAAEWGFVLWGHVRTTVIDPQGRAETNDFGPGDVWYFPRGHGHMLECLGDKPAHFILIFDNGYFSEFGTFSITDWIGHTPKALLAKNFKLPESAFDGFPKKEVYFARGAVPPATPAAPLQGLKLPPLTHKYELLEQEPHKVFKGGREWRVDSTRFPISKTVTGVVLDLEPGALRELHWHPNADEWQYVIDGNISVTMFGSHGRVRTEQMEKGDVGYIPQGYGHSIENVGDRPCRVLIGFNTGNYQAIDLSQWIAGNPADVLATNFSKPTSLFEKFPKQDVFIAPGK

SEQ ID NO: 953 - DNA, 1077 bp, synthetic construct
  misc_feature 1..1077: note = Variant of oxalate decarboxylase from Gemmata sp. SH-PL17
  source 1..1077: mol_type = other DNA
atgggtgaccctacctttatgaacaatgtaccagaccctctgctgtcgggcaaagatttgccgacgttcaagtttgagctggaaaagagcaagggcaaagtcattggggagagttcgggaaaagaagcaaccgttgtccagttacctatctccaaaggcattgctggtgtgagcatggtacttgaaccgggtgcgatgcgcgaattgcactggcatgccacagcagcagagtgggggttcgtattatggggccacgtccgtacgacggtgatcgatccacaaggtctggccgaaaccaacgactttggaccgggcgacgtgtggtattttcctcgcggtcatgggcacatgctggaatgcctgggcgataaaccggcgcatttcattctgatcttcgataacggctacttctcagagtttggcaccttctctattactgactggatcggtcacacaccgaaagcgcttctcgccaagaactttaagctgcccgaaagcgcttttgatgggtttcccaaaaaagaggtctattttgcacgtggcgcggttccaccagccacccctgcagcgcctttacagggactgaagctgccaccactcacgcataaatacgaactcctcgaacaagaacctcataaagtttttaaaggtggtcgtgaatggcgcgtggatagcactcgttttcccatttccaagactgtaaccggcgttgttcttgatttggaacccggcgcgttacgcgagcttcactggcatcctaatgctgacgagtggcaatatgtgatcgatggcaacattagtgtgacgatgttcggttctcatggccgtgtacgcaccgaacagatggagaagggtgatgtcgggtatattccacaggggtatggccacagcatcgaaaatgttggagatcgtccttgtcgcgtcttgattggctttaacacaggtaactaccaagcgatcgacttatcacagtggattgcaggtaatcccgcggatgttcttgccacgaacttctccaaacccaccagcctctttgaaaagttcccaaaacaggacgtgtttattgctcctggcaag

SEQ ID NO: 954 - protein, 359 aa, synthetic construct
  REGION 1..359: note = Variant of oxalate decarboxylase from Gemmata sp. SH-PL17
MGDPTFMNNVPDPLLSGKDLPTFKFELEKSKGKVIGESSGKEATVVQLPISKGIAGVSMVLEPGAMRELHWHATAAEWGFVLWGHVRTTVIDPQGLAETNDFGPGDVWYFPRGHGHMLECLGDKPAHFILIFDNGYFSEFGTFSITDWIGHTPKALLAKNFKLPESAFDGFPKKEVYFARGAVPPATPAAPLQGLKLPPLTHKYELLEQEPHKVFKGGREWRVDSTRFPISKTVTGVVLDLEPGALRELHWHPNADEWQYVIDGNISVTMFGSHGRVRTEQMEKGDVGYIPQGYGHSIENVGDRPCRVLIGFNTGNYQAIDLSQWIAGNPADVLATNFSKPTSLFEKFPKQDVFIAPGK

SEQ ID NO: 955 - DNA, 1077 bp, synthetic construct
  misc_feature 1..1077: note = Variant of oxalate decarboxylase from Gemmata sp. SH-PL17
  source 1..1077: mol_type = other DNA
atgggtgaccctacctttatgaacaatgtaccagaccctctgctgggtggcaaagatttgccgacgttcaagtttgagctggaaaagagcaagggcaaagtcattggggggagttcgggaaaagaagcaaccgttgtccagttacctatctccaaaggcattgctggtgtgagcatggtacttgaaccgggtgcgatgcgcgaattgcactggcatgccacagcagcagagtgggggttcgtattatggggccacgtccgtacgacggtgatcgatccacaaggtctggccgaaaccaacgactttggaccgggcgacgtgtggtattttcctcgcggtcatgggcacatgctggaatgcctgggcgataaaccggcgcatttcattctgatcttcgataacggctacttctcagagtttggcaccttctctattactgactggatcggtcacacaccgaaagcgcttctcgccaagaactttaagctgcccgaaagcgcttttgatgggtttcccaaaaaagaggtctattttgcacgtggcgcggttccaccagccacccctgcagcgcctttacagggactgaagctgccaccactcacgcataaatacgaactcctcgaacaagaacctcataaagtttttaaaggtggtcgtgaatggcgcgtggatagcactcgttttcccatttccaagactgtaaccggcgttgttcttgatttggaacccggcgcgttacgcgagcttcactggcatcctaatgctgacgagtggcaatatgtgatcgatggcaacattagtgtgacgatgttcggttctcatggccgtgtacgcaccgaacagatggagaagggtgatgtcgggtatattccacaggggtatggccacagcatcgaaaatgttggagatcgtccttgtcgcgtcttgattggctttaacacaggtaactaccaagcgatcgacttatcacagtggattgcaggtaatcccgcggatgttcttgccacgaacttctccaaacccaccagcctctttgaaaagttcccaaaacaggacgtgtttattgctcctggcaag

SEQ ID NO: 956 - protein, 359 aa, synthetic construct
  REGION 1..359: note = Variant of oxalate decarboxylase from Gemmata sp. SH-PL17
MGDPTFMNNVPDPLLGGKDLPTFKFELEKSKGKVIGGSSGKEATVVQLPISKGIAGVSMVLEPGAMRELHWHATAAEWGFVLWGHVRTTVIDPQGLAETNDFGPGDVWYFPRGHGHMLECLGDKPAHFILIFDNGYFSEFGTFSITDWIGHTPKALLAKNFKLPESAFDGFPKKEVYFARGAVPPATPAAPLQGLKLPPLTHKYELLEQEPHKVFKGGREWRVDSTRFPISKTVTGVVLDLEPGALRELHWHPNADEWQYVIDGNISVTMFGSHGRVRTEQMEKGDVGYIPQGYGHSIENVGDRPCRVLIGFNTGNYQAIDLSQWIAGNPADVLATNFSKPTSLFEKFPKQDVFIAPGK

SEQ ID NO: 957 - DNA, 1077 bp, synthetic construct
  misc_feature 1..1077: note = Variant of oxalate decarboxylase from Gemmata sp. SH-PL17
  source 1..1077: mol_type = other DNA
atgggtgaccctacctttatgaacaatgtaccagaccctctgctgtcgtggaaagatttgccgacgttcaagtttgagctggaaaagagcaagggcaaagtcattggggggagttcgggaaaagaagcaaccgttgtccagttacctatctccaaaggcattgctggtgtgagcatggtacttgaaccgggtgcgatgcgcgaattgcactggcatgccacagcagcagagtgggggttcgtattatggggccacgtccgtacgacggtgatcgatccacaaggtctggccgaaaccaacgactttggaccgggcgacgtgtggtattttcctcgcggtcatgggcacatgctggaatgcctgggcgataaaccggcgcatttcattctgatcttcgataacggctacttctcagagtttggcaccttctctattactgactggatcggtcacacaccgaaagcgcttctcgccaagaactttaagctgcccgaaagcgcttttgatgggtttcccaaaaaagaggtctattttgcacgtggcgcggttccaccagccacccctgcagcgcctttacagggactgaagctgccaccactcacgcataaatacgaactcctcgaacaagaacctcataaagtttttaaaggtggtcgtgaatggcgcgtggatagcactcgttttcccatttccaagactgtaaccggcgttgttcttgatttggaacccggcgcgttacgcgagcttcactggcatcctaatgctgacgagtggcaatatgtgatcgatggcaacattagtgtgacgatgttcggttctcatggccgtgtacgcaccgaacagatggagaagggtgatgtcgggtatattccacaggggtatggccacagcatcgaaaatgttggagatcgtccttgtcgcgtcttgattggctttaacacaggtaactaccaagcgatcgacttatcacagtggattgcaggtaatcccgcggatgttcttgccacgaacttctccaaacccaccagcctctttgaaaagttcccaaaacaggacgtgtttattgctcctggcaag

SEQ ID NO: 958 - protein, 359 aa, synthetic construct
  REGION 1..359: note = Variant of oxalate decarboxylase from Gemmata sp. SH-PL17
MGDPTFMNNVPDPLLSWKDLPTFKFELEKSKGKVIGGSSGKEATVVQLPISKGIAGVSMVLEPGAMRELHWHATAAEWGFVLWGHVRTTVIDPQGLAETNDFGPGDVWYFPRGHGHMLECLGDKPAHFILIFDNGYFSEFGTFSITDWIGHTPKALLAKNFKLPESAFDGFPKKEVYFARGAVPPATPAAPLQGLKLPPLTHKYELLEQEPHKVFKGGREWRVDSTRFPISKTVTGVVLDLEPGALRELHWHPNADEWQYVIDGNISVTMFGSHGRVRTEQMEKGDVGYIPQGYGHSIENVGDRPCRVLIGFNTGNYQAIDLSQWIAGNPADVLATNFSKPTSLFEKFPKQDVFIAPGK

SEQ ID NO: 959 - DNA, 1077 bp, synthetic construct
  misc_feature 1..1077: note = Variant of oxalate decarboxylase from Gemmata sp. SH-PL17
  source 1..1077: mol_type = other DNA
atgggtgaccctacctttatgaacaatgtaccagacgggctgctgtcgggcaaagatttgccgacgttcaagtttgagctggaaaagagcaagggcaaagtcattggggggagttcgggaaaagaagcaaccgttgtccagttacctatctccaaaggcattgctggtgtgagcatggtacttgaaccgggtgcgatgcgcgaattgcactggcatgccacagcagcagagtgggggttcgtattatggggccacgtccgtacgacggtgatcgatccacaaggtctggccgaaaccaacgactttggaccgggcgacgtgtggtattttcctcgcggtcatgggcacatgctggaatgcctgggcgataaaccggcgcatttcattctgatcttcgataacggctacttctcagagtttggcaccttctctattactgactggatcggtcacacaccgaaagcgcttctcgccaagaactttaagctgcccgaaagcgcttttgatgggtttcccaaaaaagaggtctattttgcacgtggcgcggttccaccagccacccctgcagcgcctttacagggactgaagctgccaccactcacgcataaatacgaactcctcgaacaagaacctcataaagtttttaaaggtggtcgtgaatggcgcgtggatagcactcgttttcccatttccaagactgtaaccggcgttgttcttgatttggaacccggcgcgttacgcgagcttcactggcatcctaatgctgacgagtggcaatatgtgatcgatggcaacattagtgtgacgatgttcggttctcatggccgtgtacgcaccgaacagatggagaagggtgatgtcgggtatattccacaggggtatggccacagcatcgaaaatgttggagatcgtccttgtcgcgtcttgattggctttaacacaggtaactaccaagcgatcgacttatcacagtggattgcaggtaatcccgcggatgttcttgccacgaacttctccaaacccaccagcctctttgaaaagttcccaaaacaggacgtgtttattgctcctggcaag

SEQ ID NO: 960 - protein, 359 aa, synthetic construct
  REGION 1..359: note = Variant of oxalate decarboxylase from Gemmata sp. SH-PL17
MGDPTFMNNVPDGLLSGKDLPTFKFELEKSKGKVIGGSSGKEATVVQLPISKGIAGVSMVLEPGAMRELHWHATAAEWGFVLWGHVRTTVIDPQGLAETNDFGPGDVWYFPRGHGHMLECLGDKPAHFILIFDNGYFSEFGTFSITDWIGHTPKALLAKNFKLPESAFDGFPKKEVYFARGAVPPATPAAPLQGLKLPPLTHKYELLEQEPHKVFKGGREWRVDSTRFPISKTVTGVVLDLEPGALRELHWHPNADEWQYVIDGNISVTMFGSHGRVRTEQMEKGDVGYIPQGYGHSIENVGDRPCRVLIGFNTGNYQAIDLSQWIAGNPADVLATNFSKPTSLFEKFPKQDVFIAPGK

SEQ ID NO: 961 - DNA, 1077 bp, synthetic construct
  misc_feature 1..1077: note = Variant of oxalate decarboxylase from Gemmata sp. SH-PL17
  source 1..1077: mol_type = other DNA
atgggtgaccctacctttatgaacaatgtaccagaccctctgctgtcgggcaaagatttgccgacgttcaagtttgagctggaaaagagcaagggcaaagtcattggggggagttcgggaaaagaagcaaccgttgtccagttacctatctccaaaggcattgctggtgtgagcatggtacttgaaccgggtgcgatgcgcgaattgcactggcatgccacagcagcagagtgggagttcgtattatggggccacgtccgtacgacggtgatcgatccacaaggtctggccgaaaccaacgactttggaccgggcgacgtgtggtattttcctcgcggtcatgggcacatgctggaatgcctgggcgataaaccggcgcatttcattctgatcttcgataacggctacttctcagagtttggcaccttctctattactgactggatcggtcacacaccgaaagcgcttctcgccaagaactttaagctgcccgaaagcgcttttgatgggtttcccaaaaaagaggtctattttgcacgtggcgcggttccaccagccacccctgcagcgcctttacagggactgaagctgccaccactcacgcataaatacgaactcctcgaacaagaacctcataaagtttttaaaggtggtcgtgaatggcgcgtggatagcactcgttttcccatttccaagactgtaaccggcgttgttcttgatttggaacccggcgcgttacgcgagcttcactggcatcctaatgctgacgagtggcaatatgtgatcgatggcaacattagtgtgacgatgttcggttctcatggccgtgtacgcaccgaacagatggagaagggtgatgtcgggtatattccacaggggtatggccacagcatcgaaaatgttggagatcgtccttgtcgcgtcttgattggctttaacacaggtaactaccaagcgatcgacttatcacagtggattgcaggtaatcccgcggatgttcttgccacgaacttctccaaacccaccagcctctttgaaaagttcccaaaacaggacgtgtttattgctcctggcaag

SEQ ID NO: 962 - protein, 359 aa, synthetic construct
  REGION 1..359: note = Variant of oxalate decarboxylase from Gemmata sp. SH-PL17
MGDPTFMNNVPDPLLSGKDLPTFKFELEKSKGKVIGGSSGKEATVVQLPISKGIAGVSMVLEPGAMRELHWHATAAEWEFVLWGHVRTTVIDPQGLAETNDFGPGDVWYFPRGHGHMLECLGDKPAHFILIFDNGYFSEFGTFSITDWIGHTPKALLAKNFKLPESAFDGFPKKEVYFARGAVPPATPAAPLQGLKLPPLTHKYELLEQEPHKVFKGGREWRVDSTRFPISKTVTGVVLDLEPGALRELHWHPNADEWQYVIDGNISVTMFGSHGRVRTEQMEKGDVGYIPQGYGHSIENVGDRPCRVLIGFNTGNYQAIDLSQWIAGNPADVLATNFSKPTSLFEKFPKQDVFIAPGK

SEQ ID NO: 963 - DNA, 1077 bp, synthetic construct; identical to SEQ ID NO: 845
  misc_feature 1..1077: note = Variant of oxalate decarboxylase from Gemmata sp. SH-PL17
  source 1..1077: mol_type = other DNA

SEQ ID NO: 964 - protein, 359 aa, synthetic construct; identical to SEQ ID NO: 846
  REGION 1..359: note = Variant of oxalate decarboxylase from Gemmata sp. SH-PL17

SEQ ID NO: 965 - DNA, 1077 bp, synthetic construct
  misc_feature 1..1077: note = Variant of oxalate decarboxylase from Gemmata sp. SH-PL17
  source 1..1077: mol_type = other DNA
atgggtgaccctacctttatgaacaatgtaccagaccctctgctgtcgggcaaagatttgccgacgttcaagtttgagctggaaaagagcaagggcaaagtcattggggggagttcgggaaaagaagcaaccgttgtccagttacctatctccaaaggcattgctggtgtgagcatgcagcttgaaccgggtgcgatgcgcgaattgcactggcatgccacagcagcagagtgggggttcgtattatggggccacgtccgtacgacggtgatcgatccacaaggtctggccgaaaccaacgactttggaccgggcgacgtgtggtattttcctcgcggtcatgggcacatgctggaatgcctgggcgataaaccggcgcatttcattctgatcttcgataacggctacttctcagagtttggcaccttctctattactgactggatcggtcacacaccgaaagcgcttctcgccaagaactttaagctgcccgaaagcgcttttgatgggtttcccaaaaaagaggtctattttgcacgtggcgcggttccaccagccacccctgcagcgcctttacagggactgaagctgccaccactcacgcataaatacgaactcctcgaacaagaacctcataaagtttttaaaggtggtcgtgaatggcgcgtggatagcactcgttttcccatttccaagactgtaaccggcgttgttcttgatttggaacccggcgcgttacgcgagcttcactggcatcctaatgctgacgagtggcaatatgtgatcgatggcaacattagtgtgacgatgttcggttctcatggccgtgtacgcaccgaacagatggagaagggtgatgtcgggtatattccacaggggtatggccacagcatcgaaaatgttggagatcgtccttgtcgcgtcttgattggctttaacacaggtaactaccaagcgatcgacttatcacagtggattgcaggtaatcccgcggatgttcttgccacgaacttctccaaacccaccagcctctttgaaaagttcccaaaacaggacgtgtttattgctcctggcaag

SEQ ID NO: 966 - protein, 359 aa, synthetic construct
  REGION 1..359: note = Variant of oxalate decarboxylase from Gemmata sp. SH-PL17
MGDPTFMNNVPDPLLSGKDLPTFKFELEKSKGKVIGGSSGKEATVVQLPISKGIAGVSMQLEPGAMRELHWHATAAEWGFVLWGHVRTTVIDPQGLAETNDFGPGDVWYFPRGHGHMLECLGDKPAHFILIFDNGYFSEFGTFSITDWIGHTPKALLAKNFKLPESAFDGFPKKEVYFARGAVPPATPAAPLQGLKLPPLTHKYELLEQEPHKVFKGGREWRVDSTRFPISKTVTGVVLDLEPGALRELHWHPNADEWQYVIDGNISVTMFGSHGRVRTEQMEKGDVGYIPQGYGHSIENVGDRPCRVLIGFNTGNYQAIDLSQWIAGNPADVLATNFSKPTSLFEKFPKQDVFIAPGK

SEQ ID NO: 967 - DNA, 1077 bp, synthetic construct
  misc_feature 1..1077: note = Variant of oxalate decarboxylase from Gemmata sp. SH-PL17
  source 1..1077: mol_type = other DNA
atgggtgaccctacctttatgaacaatgtaccagaccctctgctgtcgggcaaagatttgccgacgttcaagtttgagctggaaaagagcctgggcaaagtcattggggggagttcgggaaaagaagcaaccgttgtccagttacctatctccaaaggcattgctggtgtgagcatggtacttgaaccgggtgcgatgcgcgaattgcactggcatgccacagcagcagagtgggggttcgtattatggggccacgtccgtacgacggtgatcgatccacaaggtctggccgaaaccaacgactttggaccgggcgacgtgtggtattttcctcgcggtcatgggcacatgctggaatgcctgggcgataaaccggcgcatttcattctgatcttcgataacggctacttctcagagtttggcaccttctctattactgactggatcggtcacacaccgaaagcgcttctcgccaagaactttaagctgcccgaaagcgcttttgatgggtttcccaaaaaagaggtctattttgcacgtggcgcggttccaccagccacccctgcagcgcctttacagggactgaagctgccaccactcacgcataaatacgaactcctcgaacaagaacctcataaagtttttaaaggtggtcgtgaatggcgcgtggatagcactcgttttcccatttccaagactgtaaccggcgttgttcttgatttggaacccggcgcgttacgcgagcttcactggcatcctaatgctgacgagtggcaatatgtgatcgatggcaacattagtgtgacgatgttcggttctcatggccgtgtacgcaccgaacagatggagaagggtgatgtcgggtatattccacaggggtatggccacagcatcgaaaatgttggagatcgtccttgtcgcgtcttgattggctttaacacaggtaactaccaagcgatcgacttatcacagtggattgcaggtaatcccgcggatgttcttgccacgaacttctccaaacccaccagcctctttgaaaagttcccaaaacaggacgtgtttattgctcctggcaag

SEQ ID NO: 968 - protein, 359 aa, synthetic construct
  REGION 1..359: note = Variant of oxalate decarboxylase from Gemmata sp. SH-PL17
MGDPTFMNNVPDPLLSGKDLPTFKFELEKSLGKVIGGSSGKEATVVQLPISKGIAGVSMVLEPGAMRELHWHATAAEWGFVLWGHVRTTVIDPQGLAETNDFGPGDVWYFPRGHGHMLECLGDKPAHFILIFDNGYFSEFGTFSITDWIGHTPKALLAKNFKLPESAFDGFPKKEVYFARGAVPPATPAAPLQGLKLPPLTHKYELLEQEPHKVFKGGREWRVDSTRFPISKTVTGVVLDLEPGALRELHWHPNADEWQYVIDGNISVTMFGSHGRVRTEQMEKGDVGYIPQGYGHSIENVGDRPCRVLIGFNTGNYQAIDLSQWIAGNPADVLATNFSKPTSLFEKFPKQDVFIAPGK

SEQ ID NO: 969 - DNA, 1077 bp, synthetic construct
  misc_feature 1..1077: note = Variant of oxalate decarboxylase from Gemmata sp. SH-PL17
  source 1..1077: mol_type = other DNA
atgggtgaccctacctttatgaacaatgtaccagaccctctgctgtcgggcaaagatttgccgacgttcaagtttgagctggaaaagagcaagggcaaagtcattggggggagttcgggaaaagaagcaaccgttgtccagttacctatctccaaaggcattgctggtgtgagcatggtacttgaaccgggtgcgatgcgcgaattgcactggcatgccacagcagcagagtgggggttcgtattatggggccacgtccgtacgacggtgatcgatccacaaggtggggccgaaaccaacgactttggaccgggcgacgtgtggtattttcctcgcggtcatgggcacatgctggaatgcctgggcgataaaccggcgcatttcattctgatcttcgataacggctacttctcagagtttggcaccttctctattactgactggatcggtcacacaccgaaagcgcttctcgccaagaactttaagctgcccgaaagcgcttttgatgggtttcccaaaaaagaggtctattttgcacgtggcgcggttccaccagccacccctgcagcgcctttacagggactgaagctgccaccactcacgcataaatacgaactcctcgaacaagaacctcataaagtttttaaaggtggtcgtgaatggcgcgtggatagcactcgttttcccatttccaagactgtaaccggcgttgttcttgatttggaacccggcgcgttacgcgagcttcactggcatcctaatgctgacgagtggcaatatgtgatcgatggcaacattagtgtgacgatgttcggttctcatggccgtgtacgcaccgaacagatggagaagggtgatgtcgggtatattccacaggggtatggccacagcatcgaaaatgttggagatcgtccttgtcgcgtcttgattggctttaacacaggtaactaccaagcgatcgacttatcacagtggattgcaggtaatcccgcggatgttcttgccacgaacttctccaaacccaccagcctctttgaaaagttcccaaaacaggacgtgtttattgctcctggcaag

SEQ ID NO: 970 - protein, 359 aa, synthetic construct
  REGION 1..359: note = Variant of oxalate decarboxylase from Gemmata sp. SH-PL17
MGDPTFMNNVPDPLLSGKDLPTFKFELEKSKGKVIGGSSGKEATVVQLPISKGIAGVSMVLEPGAMRELHWHATAAEWGFVLWGHVRTTVIDPQGGAETNDFGPGDVWYFPRGHGHMLECLGDKPAHFILIFDNGYFSEFGTFSITDWIGHTPKALLAKNFKLPESAFDGFPKKEVYFARGAVPPATPAAPLQGLKLPPLTHKYELLEQEPHKVFKGGREWRVDSTRFPISKTVTGVVLDLEPGALRELHWHPNADEWQYVIDGNISVTMFGSHGRVRTEQMEKGDVGYIPQGYGHSIENVGDRPCRVLIGFNTGNYQAIDLSQWIAGNPADVLATNFSKPTSLFEKFPKQDVFIAPGK

SEQ ID NO: 971 - DNA, 1077 bp, synthetic construct
  misc_feature 1..1077: note = Variant of oxalate decarboxylase from Gemmata sp. SH-PL17
  source 1..1077: mol_type = other DNA
atgggtgaccctacctttatgaacaatgtaccagaccctctgctgtcgggcaaagatttgccgacgttcaagtttgagctggaaaagagcaagggcaaagtcattggggggagttcgggaaaagaagcaaccgttgtccagttacctatctccaaaggcattgctggtgtgagcatggtacttgaaccgggtgcgatgcgcgaattgcactggcatgccacagcagcagagtgggggttcgtattatggggccacgtccgtacgacggtgatcgatccacaaggtacggccgaaaccaacgactttggaccgggcgacgtgtggtattttcctcgcggtcatgggcacatgctggaatgcctgggcgataaaccggcgcatttcattctgatcttcgataacggctacttctcagagtttggcaccttctctattactgactggatcggtcacacaccgaaagcgcttctcgccaagaactttaagctgcccgaaagcgcttttgatgggtttcccaaaaaagaggtctattttgcacgtggcgcggttccaccagccacccctgcagcgcctttacagggactgaagctgccaccactcacgcataaatacgaactcctcgaacaagaacctcataaagtttttaaaggtggtcgtgaatggcgcgtggatagcactcgttttcccatttccaagactgtaaccggcgttgttcttgatttggaacccggcgcgttacgcgagcttcactggcatcctaatgctgacgagtggcaatatgtgatcgatggcaacattagtgtgacgatgttcggttctcatggccgtgtacgcaccgaacagatggagaagggtgatgtcgggtatattccacaggggtatggccacagcatcgaaaatgttggagatcgtccttgtcgcgtcttgattggctttaacacaggtaactaccaagcgatcgacttatcacagtggattgcaggtaatcccgcggatgttcttgccacgaacttctccaaacccaccagcctctttgaaaagttcccaaaacaggacgtgtttattgctcctggcaag

SEQ ID NO: 972 - protein, 359 aa, synthetic construct
  REGION 1..359: note = Variant of oxalate decarboxylase from Gemmata sp. SH-PL17
MGDPTFMNNVPDPLLSGKDLPTFKFELEKSKGKVIGGSSGKEATVVQLPISKGIAGVSMVLEPGAMRELHWHATAAEWGFVLWGHVRTTVIDPQGTAETNDFGPGDVWYFPRGHGHMLECLGDKPAHFILIFDNGYFSEFGTFSITDWIGHTPKALLAKNFKLPESAFDGFPKKEVYFARGAVPPATPAAPLQGLKLPPLTHKYELLEQEPHKVFKGGREWRVDSTRFPISKTVTGVVLDLEPGALRELHWHPNADEWQYVIDGNISVTMFGSHGRVRTEQMEKGDVGYIPQGYGHSIENVGDRPCRVLIGFNTGNYQAIDLSQWIAGNPADVLATNFSKPTSLFEKFPKQDVFIAPGK

SEQ ID NO: 973 - DNA, 1077 bp, synthetic construct
  misc_feature 1..1077: note = Variant of oxalate decarboxylase from Gemmata sp. SH-PL17
  source 1..1077: mol_type = other DNA
atgggtgaccctacctttatgaacaatgtaccagaccctctgctgtcgggcaaagatttgccgacgttcaagtttgagctggaaaagagcaagggcaaagtcattggggggagttcgggaaaagaagcaaccgttgtccagttacctatctccaaaggcattgctggtgtgagcatggggcttgaaccgggtgcgatgcgcgaattgcactggcatgccacagcagcagagtgggggttcgtattatggggccacgtccgtacgacggtgatcgatccacaaggtctggccgaaaccaacgactttggaccgggcgacgtgtggtattttcctcgcggtcatgggcacatgctggaatgcctgggcgataaaccggcgcatttcattctgatcttcgataacggctacttctcagagtttggcaccttctctattactgactggatcggtcacacaccgaaagcgcttctcgccaagaactttaagctgcccgaaagcgcttttgatgggtttcccaaaaaagaggtctattttgcacgtggcgcggttccaccagccacccctgcagcgcctttacagggactgaagctgccaccactcacgcataaatacgaactcctcgaacaagaacctcataaagtttttaaaggtggtcgtgaatggcgcgtggatagcactcgttttcccatttccaagactgtaaccggcgttgttcttgatttggaacccggcgcgttacgcgagcttcactggcatcctaatgctgacgagtggcaatatgtgatcgatggcaacattagtgtgacgatgttcggttctcatggccgtgtacgcaccgaacagatggagaagggtgatgtcgggtatattccacaggggtatggccacagcatcgaaaatgttggagatcgtccttgtcgcgtcttgattggctttaacacaggtaactaccaagcgatcgacttatcacagtggattgcaggtaatcccgcggatgttcttgccacgaacttctccaaacccaccagcctctttgaaaagttcccaaaacaggacgtgtttattgctcctggcaag

SEQ ID NO: 974 - protein, 359 aa, synthetic construct
  REGION 1..359: note = Variant of oxalate decarboxylase from Gemmata sp. SH-PL17
MGDPTFMNNVPDPLLSGKDLPTFKFELEKSKGKVIGGSSGKEATVVQLPISKGIAGVSMGLEPGAMRELHWHATAAEWGFVLWGHVRTTVIDPQGLAETNDFGPGDVWYFPRGHGHMLECLGDKPAHFILIFDNGYFSEFGTFSITDWIGHTPKALLAKNFKLPESAFDGFPKKEVYFARGAVPPATPAAPLQGLKLPPLTHKYELLEQEPHKVFKGGREWRVDSTRFPISKTVTGVVLDLEPGALRELHWHPNADEWQYVIDGNISVTMFGSHGRVRTEQMEKGDVGYIPQGYGHSIENVGDRPCRVLIGFNTGNYQAIDLSQWIAGNPADVLATNFSKPTSLFEKFPKQDVFIAPGK

SEQ ID NO: 975 - DNA, 1077 bp, synthetic construct
  misc_feature 1..1077: note = Variant of oxalate decarboxylase from Gemmata sp. SH-PL17
  source 1..1077: mol_type = other DNA
atgggtgaccctacctttatgaacaatgtaccagaccctctgctgtggggcaaagatttgccgacgttcaagtttgagctggaaaagagcaagggcaaagtcattggggggagttcgggaaaagaagcaaccgttgtccagttacctatctccaaaggcattgctggtgtgagcatggtacttgaaccgggtgcgatgcgcgaattgcactggcatgccacagcagcagagtgggggttcgtattatggggccacgtccgtacgacggtgatcgatccacaaggtctggccgaaaccaacgactttggaccgggcgacgtgtggtattttcctcgcggtcatgggcacatgctggaatgcctgggcgataaaccggcgcatttcattctgatcttcgataacggctacttctcagagtttggcaccttctctattactgactggatcggtcacacaccgaaagcgcttctcgccaagaactttaagctgcccgaaagcgcttttgatgggtttcccaaaaaagaggtctattttgcacgtggcgcggttccaccagccacccctgcagcgcctttacagggactgaagctgccaccactcacgcataaatacgaactcctcgaacaagaacctcataaagtttttaaaggtggtcgtgaatggcgcgtggatagcactcgttttcccatttccaagactgtaaccggcgttgttcttgatttggaacccggcgcgttacgcgagcttcactggcatcctaatgctgacgagtggcaatatgtgatcgatggcaacattagtgtgacgatgttcggttctcatggccgtgtacgcaccgaacagatggagaagggtgatgtcgggtatattccacaggggtatggccacagcatcgaaaatgttggagatcgtccttgtcgcgtcttgattggctttaacacaggtaactaccaagcgatcgacttatcacagtggattgcaggtaatcccgcggatgttcttgccacgaacttctccaaacccaccagcctctttgaaaagttcccaaaacaggacgtgtttattgctcctggcaag

SEQ ID NO: 976 - protein, 359 aa, synthetic construct
  REGION 1..359: note = Variant of oxalate decarboxylase from Gemmata sp. SH-PL17
MGDPTFMNNVPDPLLWGKDLPTFKFELEKSKGKVIGGSSGKEATVVQLPISKGIAGVSMVLEPGAMRELHWHATAAEWGFVLWGHVRTTVIDPQGLAETNDFGPGDVWYFPRGHGHMLECLGDKPAHFILIFDNGYFSEFGTFSITDWIGHTPKALLAKNFKLPESAFDGFPKKEVYFARGAVPPATPAAPLQGLKLPPLTHKYELLEQEPHKVFKGGREWRVDSTRFPISKTVTGVVLDLEPGALRELHWHPNADEWQYVIDGNISVTMFGSHGRVRTEQMEKGDVGYIPQGYGHSIENVGDRPCRVLIGFNTGNYQAIDLSQWIAGNPADVLATNFSKPTSLFEKFPKQDVFIAPGK

SEQ ID NO: 977 - DNA, 1077 bp, synthetic construct
  misc_feature 1..1077: note = Variant of oxalate decarboxylase from Gemmata sp. SH-PL17
  source 1..1077: mol_type = other DNA
atgggtgaccctacctttatgaacaatgtaccagacacgctgctgtcgggcaaagatttgccgacgttcaagtttgagctggaaaagagcaagggcaaagtcattggggggagttcgggaaaagaagcaaccgttgtccagttacctatctccaaaggcattgctggtgtgagcatggtacttgaaccgggtgcgatgcgcgaattgcactggcatgccacagcagcagagtgggggttcgtattatggggccacgtccgtacgacggtgatcgatccacaaggtctggccgaaaccaacgactttggaccgggcgacgtgtggtattttcctcgcggtcatgggcacatgctggaatgcctgggcgataaaccggcgcatttcattctgatcttcgataacggctacttctcagagtttggcaccttctctattactgactggatcggtcacacaccgaaagcgcttctcgccaagaactttaagctgcccgaaagcgcttttgatgggtttcccaaaaaagaggtctattttgcacgtggcgcggttccaccagccacccctgcagcgcctttacagggactgaagctgccaccactcacgcataaatacgaactcctcgaacaagaacctcataaagtttttaaaggtggtcgtgaatggcgcgtggatagcactcgttttcccatttccaagactgtaaccggcgttgttcttgatttggaacccggcgcgttacgcgagcttcactggcatcctaatgctgacgagtggcaatatgtgatcgatggcaacattagtgtgacgatgttcggttctcatggccgtgtacgcaccgaacagatggagaagggtgatgtcgggtatattccacaggggtatggccacagcatcgaaaatgttggagatcgtccttgtcgcgtcttgattggctttaacacaggtaactaccaagcgatcgacttatcacagtggattgcaggtaatcccgcggatgttcttgccacgaacttctccaaacccaccagcctctttgaaaagttcccaaaacaggacgtgtttattgctcctggcaag

SEQ ID NO: 978 - protein, 359 aa, synthetic construct
  REGION 1..359: note = Variant of oxalate decarboxylase from Gemmata sp. SH-PL17
MGDPTFMNNVPDTLLSGKDLPTFKFELEKSKGKVIGGSSGKEATVVQLPISKGIAGVSMVLEPGAMRELHWHATAAEWGFVLWGHVRTTVIDPQGLAETNDFGPGDVWYFPRGHGHMLECLGDKPAHFILIFDNGYFSEFGTFSITDWIGHTPKALLAKNFKLPESAFDGFPKKEVYFARGAVPPATPAAPLQGLKLPPLTHKYELLEQEPHKVFKGGREWRVDSTRFPISKTVTGVVLDLEPGALRELHWHPNADEWQYVIDGNISVTMFGSHGRVRTEQMEKGDVGYIPQGYGHSIENVGDRPCRVLIGFNTGNYQAIDLSQWIAGNPADVLATNFSKPTSLFEKFPKQDVFIAPGK

SEQ ID NO: 979 - DNA, 1077 bp, synthetic construct
  misc_feature 1..1077: note = Variant of oxalate decarboxylase from Gemmata sp. SH-PL17
  source 1..1077: mol_type = other DNA
atgggtgaccctacctttatgaacaatgtaccagaccctctgctgtcgggcaaagatttgccgacgttcaagtttgagctggaaaagagcaagggcaaagtcattggggggagttcgggaaaagaagcaaccgttgtccagttacctatctccaaaggcattgctggtgtgagcatggtacttgaaccgggtgcgatgcgcgaattgcactggcatgccacagcagcagagtggaggttcgtattatggggccacgtccgtacgacggtgatcgatccacaaggtctggccgaaaccaacgactttggaccgggcgacgtgtggtattttcctcgcggtcatgggcacatgctggaatgcctgggcgataaaccggcgcatttcattctgatcttcgataacggctacttctcagagtttggcaccttctctattactgactggatcggtcacacaccgaaagcgcttctcgccaagaactttaagctgcccgaaagcgcttttgatgggtttcccaaaaaagaggtctattttgcacgtggcgcggttccaccagccacccctgcagcgcctttacagggactgaagctgccaccactcacgcataaatacgaactcctcgaacaagaacctcataaagtttttaaaggtggtcgtgaatggcgcgtggatagcactcgttttcccatttccaagactgtaaccggcgttgttcttgatttggaacccggcgcgttacgcgagcttcactggcatcctaatgctgacgagtggcaatatgtgatcgatggcaacattagtgtgacgatgttcggttctcatggccgtgtacgcaccgaacagatggagaagggtgatgtcgggtatattccacaggggtatggccacagcatcgaaaatgttggagatcgtccttgtcgcgtcttgattggctttaacacaggtaactaccaagcgatcgacttatcacagtggattgcaggtaatcccgcggatgttcttgccacgaacttctccaaacccaccagcctctttgaaaagttcccaaaacaggacgtgtttattgctcctggcaag

SEQ ID NO: 980 - protein, 359 aa, synthetic construct
  REGION 1..359: note = Variant of oxalate decarboxylase from Gemmata sp. SH-PL17
MGDPTFMNNVPDPLLSGKDLPTFKFELEKSKGKVIGGSSGKEATVVQLPISKGIAGVSMVLEPGAMRELHWHATAAEWRFVLWGHVRTTVIDPQGLAETNDFGPGDVWYFPRGHGHMLECLGDKPAHFILIFDNGYFSEFGTFSITDWIGHTPKALLAKNFKLPESAFDGFPKKEVYFARGAVPPATPAAPLQGLKLPPLTHKYELLEQEPHKVFKGGREWRVDSTRFPISKTVTGVVLDLEPGALRELHWHPNADEWQYVIDGNISVTMFGSHGRVRTEQMEKGDVGYIPQGYGHSIENVGDRPCRVLIGFNTGNYQAIDLSQWIAGNPADVLATNFSKPTSLFEKFPKQDVFIAPGK

SEQ ID NO: 981 - DNA, 1077 bp, synthetic construct
  misc_feature 1..1077: note = Variant of oxalate decarboxylase from Gemmata sp. SH-PL17
  source 1..1077: mol_type = other DNA
atgggtgaccctacctttatgaacaatgtaccagaccctctgctgtcgggcaaagatttgccgacgttcaagttttatctggaaaagagcaagggcaaagtcattggggggagttcgggaaaagaagcaaccgttgtccagttacctatctccaaaggcattgctggtgtgagcatggtacttgaaccgggtgcgatgcgcgaattgcactggcatgccacagcagcagagtgggggttcgtattatggggccacgtccgtacgacggtgatcgatccacaaggtctggccgaaaccaacgactttggaccgggcgacgtgtggtattttcctcgcggtcatgggcacatgctggaatgcctgggcgataaaccggcgcatttcattctgatcttcgataacggctacttctcagagtttggcaccttctctattactgactggatcggtcacacaccgaaagcgcttctcgccaagaactttaagctgcccgaaagcgcttttgatgggtttcccaaaaaagaggtctattttgcacgtggcgcggttccaccagccacccctgcagcgcctttacagggactgaagctgccaccactcacgcataaatacgaactcctcgaacaagaacctcataaagtttttaaaggtggtcgtgaatggcgcgtggatagcactcgttttcccatttccaagactgtaaccggcgttgttcttgatttggaacccggcgcgttacgcgagcttcactggcatcctaatgctgacgagtggcaatatgtgatcgatggcaacattagtgtgacgatgttcggttctcatggccgtgtacgcaccgaacagatggagaagggtgatgtcgggtatattccacaggggtatggccacagcatcgaaaatgttggagatcgtccttgtcgcgtcttgattggctttaacacaggtaactaccaagcgatcgacttatcacagtggattgcaggtaatcccgcggatgttcttgccacgaacttctccaaacccaccagcctctttgaaaagttcccaaaacaggacgtgtttattgctcctggcaag

SEQ ID NO: 982 - protein, 359 aa, synthetic construct
  REGION 1..359: note = Variant of oxalate decarboxylase from Gemmata sp. SH-PL17
MGDPTFMNNVPDPLLSGKDLPTFKFYLEKSKGKVIGGSSGKEATVVQLPISKGIAGVSMVLEPGAMRELHWHATAAEWGFVLWGHVRTTVIDPQGLAETNDFGPGDVWYFPRGHGHMLECLGDKPAHFILIFDNGYFSEFGTFSITDWIGHTPKALLAKNFKLPESAFDGFPKKEVYFARGAVPPATPAAPLQGLKLPPLTHKYELLEQEPHKVFKGGREWRVDSTRFPISKTVTGVVLDLEPGALRELHWHPNADEWQYVIDGNISVTMFGSHGRVRTEQMEKGDVGYIPQGYGHSIENVGDRPCRVLIGFNTGNYQAIDLSQWIAGNPADVLATNFSKPTSLFEKFPKQDVFIAPGK

SEQ ID NO: 983 - DNA, 1077 bp, synthetic construct
  misc_feature 1..1077: note = Variant of oxalate decarboxylase from Gemmata sp. SH-PL17
  source 1..1077: mol_type = other DNA
atgggtgaccctacctttatgaacaatgtaccagaccctctgctgtcgggcaaagatttgccgacgttcaagttttcgctggaaaagagcaagggcaaagtcattggggggagttcgggaaaagaagcaaccgttgtccagttacctatctccaaaggcattgctggtgtgagcatggtacttgaaccgggtgcgatgcgcgaattgcactggcatgccacagcagcagagtgggggttcgtattatggggccacgtccgtacgacggtgatcgatccacaaggtctggccgaaaccaacgactttggaccgggcgacgtgtggtattttcctcgcggtcatgggcacatgctggaatgcctgggcgataaaccggcgcatttcattctgatcttcgataacggctacttctcagagtttggcaccttctctattactgactggatcggtcacacaccgaaagcgcttctcgccaagaactttaagctgcccgaaagcgcttttgatgggtttcccaaaaaagaggtctattttgcacgtggcgcggttccaccagccacccctgcagcgcctttacagggactgaagctgccaccactcacgcataaatacgaactcctcgaacaagaacctcataaagtttttaaaggtggtcgtgaatggcgcgtggatagcactcgttttcccatttccaagactgtaaccggcgttgttcttgatttggaacccggcgcgttacgcgagcttcactggcatcctaatgctgacgagtggcaatatgtgatcgatggcaacattagtgtgacgatgttcggttctcatggccgtgtacgcaccgaacagatggagaagggtgatgtcgggtatattccacaggggtatggccacagcatcgaaaatgttggagatcgtccttgtcgcgtcttgattggctttaacacaggtaactaccaagcgatcgacttatcacagtggattgcaggtaatcccgcggatgttcttgccacgaacttctccaaacccaccagcctctttgaaaagttcccaaaacaggacgtgtttattgctcctggcaag

SEQ ID NO: 984 - protein, 359 aa, synthetic construct
  REGION 1..359: note = Variant of oxalate decarboxylase from Gemmata sp. SH-PL17
MGDPTFMNNVPDPLLSGKDLPTFKFSLEKSKGKVIGGSSGKEATVVQLPISKGIAGVSMVLEPGAMRELHWHATAAEWGFVLWGHVRTTVIDPQGLAETNDFGPGDVWYFPRGHGHMLECLGDKPAHFILIFDNGYFSEFGTFSITDWIGHTPKALLAKNFKLPESAFDGFPKKEVYFARGAVPPATPAAPLQGLKLPPLTHKYELLEQEPHKVFKGGREWRVDSTRFPISKTVTGVVLDLEPGALRELHWHPNADEWQYVIDGNISVTMFGSHGRVRTEQMEKGDVGYIPQGYGHSIENVGDRPCRVLIGFNTGNYQAIDLSQWIAGNPADVLATNFSKPTSLFEKFPKQDVFIAPGK

SEQ ID NO: 985 - DNA, 1077 bp, synthetic construct
  misc_feature 1..1077: note = Variant of oxalate decarboxylase from Gemmata sp. SH-PL17
  source 1..1077: mol_type = other DNA
atgggtgaccctacctttatgaacaatgtaccagaccctctgctgtcgggcaaagatttgccgacgttcaagtttgagctggaaaagagcaagggcaaagtcattggggggagttcgggaaaagaagcaaccgttgtccagttacctatctccaaaggcattgctggtgtgagcatggtacttgaaccgggtgcgatgcgcgaattgcactggcatgccacagcagcagagtgggggttcgtattatggggccacgtccgtacgacggtgatcgatccacaaggtctggccgaaaccaacgactttggaccgggcgacgtgtggtattttcctcgcggtcatgggcacatgctggaatgcctgggcgataaaccggcgcatttcattctgatcttcgataacggctacttctcagagtttggcaccttctctattactgactggatcggtcacacaccgaaagcgcttctcgccaagaactttaagctgcccgaaagcgcttttgatgggtttcccaaaaaagaggtctattttgcacgtggcgcggttccaccagccacccctgcagcgcctttacagggaaggaagctgccaccactcacgcataaatacgaactcctcgaacaagaacctcataaagtttttaaaggtggtcgtgaatggcgcgtggatagcactcgttttcccatttccaagactgtaaccggcgttgttcttgatttggaacccggcgcgttacgcgagcttcactggcatcctaatgctgacgagtggcaatatgtgatcgatggcaacattagtgtgacgatgttcggttctcatggccgtgtacgcaccgaacagatggagaagggtgatgtcgggtatattccacaggggtatggccacagcatcgaaaatgttggagatcgtccttgtcgcgtcttgattggctttaacacaggtaactaccaagcgatcgacttatcacagtggattgcaggtaatcccgcggatgttcttgccacgaacttctccaaacccaccagcctctttgaaaagttcccaaaacaggacgtgtttattgctcctggcaag

SEQ ID NO: 986 - protein, 359 aa, synthetic construct
  REGION 1..359: note = Variant of oxalate decarboxylase from Gemmata sp. SH-PL17
MGDPTFMNNVPDPLLSGKDLPTFKFELEKSKGKVIGGSSGKEATVVQLPISKGIAGVSMVLEPGAMRELHWHATAAEWGFVLWGHVRTTVIDPQGLAETNDFGPGDVWYFPRGHGHMLECLGDKPAHFILIFDNGYFSEFGTFSITDWIGHTPKALLAKNFKLPESAFDGFPKKEVYFARGAVPPATPAAPLQGRKLPPLTHKYELLEQEPHKVFKGGREWRVDSTRFPISKTVTGVVLDLEPGALRELHWHPNADEWQYVIDGNISVTMFGSHGRVRTEQMEKGDVGYIPQGYGHSIENVGDRPCRVLIGFNTGNYQAIDLSQWIAGNPADVLATNFSKPTSLFEKFPKQDVFIAPGK

SEQ ID NO: 987 - DNA, 1077 bp, synthetic construct
  misc_feature 1..1077: note = Variant of oxalate decarboxylase from Gemmata sp. SH-PL17
  source 1..1077: mol_type = other DNA
atgggtgaccctacctttatgaacaatgtaccagaccctctgctgtcgaggaaagatttgccgacgttcaagtttgagctggaaaagagcaagggcaaagtcattggggggagttcgggaaaagaagcaaccgttgtccagttacctatctccaaaggcattgctggtgtgagcatggtacttgaaccgggtgcgatgcgcgaattgcactggcatgccacagcagcagagtgggggttcgtattatggggccacgtccgtacgacggtgatcgatccacaaggtctggccgaaaccaacgactttggaccgggcgacgtgtggtattttcctcgcggtcatgggcacatgctggaatgcctgggcgataaaccggcgcatttcattctgatcttcgataacggctacttctcagagtttggcaccttctctattactgactggatcggtcacacaccgaaagcgcttctcgccaagaactttaagctgcccgaaagcgcttttgatgggtttcccaaaaaagaggtctattttgcacgtggcgcggttccaccagccacccctgcagcgcctttacagggactgaagctgccaccactcacgcataaatacgaactcctcgaacaagaacctcataaagtttttaaaggtggtcgtgaatggcgcgtggatagcactcgttttcccatttccaagactgtaaccggcgttgttcttgatttggaacccggcgcgttacgcgagcttcactggcatcctaatgctgacgagtggcaatatgtgatcgatggcaacattagtgtgacgatgttcggttctcatggccgtgtacgcaccgaacagatggagaagggtgatgtcgggtatattccacaggggtatggccacagcatcgaaaatgttggagatcgtccttgtcgcgtcttgattggctttaacacaggtaactaccaagcgatcgacttatcacagtggattgcaggtaatcccgcggatgttcttgccacgaacttctccaaacccaccagcctctttgaaaagttcccaaaacaggacgtgtttattgctcctggcaag

SEQ ID NO: 988 - protein, 359 aa, synthetic construct
  REGION 1..359: note = Variant of oxalate decarboxylase from Gemmata sp. SH-PL17
MGDPTFMNNVPDPLLSRKDLPTFKFELEKSKGKVIGGSSGKEATVVQLPISKGIAGVSMVLEPGAMRELHWHATAAEWGFVLWGHVRTTVIDPQGLAETNDFGPGDVWYFPRGHGHMLECLGDKPAHFILIFDNGYFSEFGTFSITDWIGHTPKALLAKNFKLPESAFDGFPKKEVYFARGAVPPATPAAPLQGLKLPPLTHKYELLEQEPHKVFKGGREWRVDSTRFPISKTVTGVVLDLEPGALRELHWHPNADEWQYVIDGNISVTMFGSHGRVRTEQMEKGDVGYIPQGYGHSIENVGDRPCRVLIGFNTGNYQAIDLSQWIAGNPADVLATNFSKPTSLFEKFPKQDVFIAPGK

SEQ ID NO: 989 - DNA, 1077 bp, synthetic construct
  misc_feature 1..1077: note = Variant of oxalate decarboxylase from Gemmata sp. SH-PL17
  source 1..1077: mol_type = other DNA
atgggtgaccctacctttatgaacaatgtaccagacgtgctgctgtcgggcaaagatttgccgacgttcaagtttgagctggaaaagagcaagggcaaagtcattggggggagttcgggaaaagaagcaaccgttgtccagttacctatctccaaaggcattgctggtgtgagcatggtacttgaaccgggtgcgatgcgcgaattgcactggcatgccacagcagcagagtgggggttcgtattatggggccacgtccgtacgacggtgatcgatccacaaggtctggccgaaaccaacgactttggaccgggcgacgtgtggtattttcctcgcggtcatgggcacatgctggaatgcctgggcgataaaccggcgcatttcattctgatcttcgataacggctacttctcagagtttggcaccttctctattactgactggatcggtcacacaccgaaagcgcttctcgccaagaactttaagctgcccgaaagcgcttttgatgggtttcccaaaaaagaggtctattttgcacgtggcgcggttccaccagccacccctgcagcgcctttacagggactgaagctgccaccactcacgcataaatacgaactcctcgaacaagaacctcataaagtttttaaaggtggtcgtgaatggcgcgtggatagcactcgttttcccatttccaagactgtaaccggcgttgttcttgatttggaacccggcgcgttacgcgagcttcactggcatcctaatgctgacgagtggcaatatgtgatcgatggcaacattagtgtgacgatgttcggttctcatggccgtgtacgcaccgaacagatggagaagggtgatgtcgggtatattccacaggggtatggccacagcatcgaaaatgttggagatcgtccttgtcgcgtcttgattggctttaacacaggtaactaccaagcgatcgacttatcacagtggattgcaggtaatcccgcggatgttcttgccacgaacttctccaaacccaccagcctctttgaaaagttcccaaaacaggacgtgtttattgctcctggcaag

SEQ ID NO: 990 - protein, 359 aa, synthetic construct
  REGION 1..359: note = Variant of oxalate decarboxylase from Gemmata sp. SH-PL17
MGDPTFMNNVPDVLLSGKDLPTFKFELEKSKGKVIGGSSGKEATVVQLPISKGIAGVSMVLEPGAMRELHWHATAAEWGFVLWGHVRTTVIDPQGLAETNDFGPGDVWYFPRGHGHMLECLGDKPAHFILIFDNGYFSEFGTFSITDWIGHTPKALLAKNFKLPESAFDGFPKKEVYFARGAVPPATPAAPLQGLKLPPLTHKYELLEQEPHKVFKGGREWRVDSTRFPISKTVTGVVLDLEPGALRELHWHPNADEWQYVIDGNISVTMFGSHGRVRTEQMEKGDVGYIPQGYGHSIENVGDRPCRVLIGFNTGNYQAIDLSQWIAGNPADVLATNFSKPTSLFEKFPKQDVFIAPGK

SEQ ID NO: 991 - DNA, 1077 bp, synthetic construct
  misc_feature 1..1077: note = Variant of oxalate decarboxylase from Gemmata sp. SH-PL17
  source 1..1077: mol_type = other DNA
atgggtgaccctacctttatgaacaatgtaccagaccctctgctgtcgggcaaagatttgccgacgttcaagtttgagctggaaaagagcaagggcaaagtcattggggggagttcgggaaaagaagcaaccgttgtccagttacctatctccaaaggcattgctggtgtgagcatggtacttgaaccgggtgcgatgcgcgaattgcactggcatgccacagcagcagagtgggggttcgtattatggggccacgtccgtacgacggtgatcgatccacaaggtctggccgaaaccaacgactttggaccgggcgacgtgtggtattttcctcgcggtcatgggcacatgctggaatgcctgggcgataaaccggcgcatttcattctgatcttcgataacggctacttctcagagtttggcaccttctctattactgactggatcggtcacacaccgaaagcgcttctcgccaagaactttaagctgcccgaaagcgcttttgatgggtttcccaaaaaagaggtctattttgcacgtggcgcggttccaccagccacccctgcagcgcctttacagggactgaagctgccaccactcacgcataaatacgaactcctcgaacaagaacctcataaagtttttaaaggtggtcgtgaatggcgcgtggatagcactcgttttcccatttccaagactgtaaccggcgttgttcttgatttggaacccggcgcgttacgcgagcttcactggcatcctaatgctgacgagtggcaatatgtgatcgatggcaacattagtgtgacgatgttcggttctcatggccgtgagcgcaccgaacagatggagaagggtgatgtcgggtatattccacaggggtatggccacagcatcgaaaatgttggagatcgtccttgtcgcgtcttgattggctttaacacaggtaactaccaagcgatcgacttatcacagtggattgcaggtaatcccgcggatgttcttgccacgaacttctccaaacccaccagcctctttgaaaagttcccaaaacaggacgtgtttattgctcctggcaag

SEQ ID NO: 992 - protein, 359 aa, synthetic construct
  REGION 1..359: note = Variant of oxalate decarboxylase from Gemmata sp. SH-PL17
MGDPTFMNNVPDPLLSGKDLPTFKFELEKSKGKVIGGSSGKEATVVQLPISKGIAGVSMVLEPGAMRELHWHATAAEWGFVLWGHVRTTVIDPQGLAETNDFGPGDVWYFPRGHGHMLECLGDKPAHFILIFDNGYFSEFGTFSITDWIGHTPKALLAKNFKLPESAFDGFPKKEVYFARGAVPPATPAAPLQGLKLPPLTHKYELLEQEPHKVFKGGREWRVDSTRFPISKTVTGVVLDLEPGALRELHWHPNADEWQYVIDGNISVTMFGSHGRERTEQMEKGDVGYIPQGYGHSIENVGDRPCRVLIGFNTGNYQAIDLSQWIAGNPADVLATNFSKPTSLFEKFPKQDVFIAPGK

SEQ ID NO: 993 - DNA, 1077 bp, synthetic construct
  misc_feature 1..1077: note = Variant of oxalate decarboxylase from Gemmata sp. SH-PL17
  source 1..1077: mol_type = other DNA
atgggtgaccctacctttatgaacaatgtaccagaccctctgctgtcgggcaaagatttgccgacgttcaagtttgagctggaaaagagcaagggcaaagtcattgggcttagttcgggaaaagaagcaaccgttgtccagttacctatctccaaaggcattgctggtgtgagcatggtacttgaaccgggtgcgatgcgcgaattgcactggcatgccacagcagcagagtgggggttcgtattatggggccacgtccgtacgacggtgatcgatccacaaggtctggccgaaaccaacgactttggaccgggcgacgtgtggtattttcctcgcggtcatgggcacatgctggaatgcctgggcgataaaccggcgcatttcattctgatcttcgataacggctacttctcagagtttggcaccttctctattactgactggatcggtcacacaccgaaagcgcttctcgccaagaactttaagctgcccgaaagcgcttttgatgggtttcccaaaaaagaggtctattttgcacgtggcgcggttccaccagccacccctgcagcgcctttacagggactgaagctgccaccactcacgcataaatacgaactcctcgaacaagaacctcataaagtttttaaaggtggtcgtgaatggcgcgtggatagcactcgttttcccatttccaagactgtaaccggcgttgttcttgatttggaacccggcgcgttacgcgagcttcactggcatcctaatgctgacgagtggcaatatgtgatcgatggcaacattagtgtgacgatgttcggttctcatggccgtgtacgcaccgaacagatggagaagggtgatgtcgggtatattccacaggggtatggccacagcatcgaaaatgttggagatcgtccttgtcgcgtcttgattggctttaacacaggtaactaccaagcgatcgacttatcacagtggattgcaggtaatcccgcggatgttcttgccacgaacttctccaaacccaccagcctctttgaaaagttcccaaaacaggacgtgtttattgctcctggcaag

SEQ ID NO: 994 - protein, 359 aa, synthetic construct
  REGION 1..359: note = Variant of oxalate decarboxylase from Gemmata sp. SH-PL17
MGDPTFMNNVPDPLLSGKDLPTFKFELEKSKGKVIGLSSGKEATVVQLPISKGIAGVSMVLEPGAMRELHWHATAAEWGFVLWGHVRTTVIDPQGLAETNDFGPGDVWYFPRGHGHMLECLGDKPAHFILIFDNGYFSEFGTFSITDWIGHTPKALLAKNFKLPESAFDGFPKKEVYFARGAVPPATPAAPLQGLKLPPLTHKYELLEQEPHKVFKGGREWRVDSTRFPISKTVTGVVLDLEPGALRELHWHPNADEWQYVIDGNISVTMFGSHGRVRTEQMEKGDVGYIPQGYGHSIENVGDRPCRVLIGFNTGNYQAIDLSQWIAGNPADVLATNFSKPTSLFEKFPKQDVFIAPGK

SEQ ID NO: 995 - DNA, 1077 bp, synthetic construct
  misc_feature 1..1077: note = Variant of oxalate decarboxylase from Gemmata sp. SH-PL17
  source 1..1077: mol_type = other DNA
atgggtgaccctacctttatgaacaatgtaccagaccctctgctgtcgggcaaagatttgccgacgttcaagtttgagctggaaaagagcaagggcaaagtcattggggggagttcgggaaaagaagcaaccgttgtccagttacctatctccaaaggcattgctggtgtgagcatggtacttgaaccgggtgcgatgcgcgaattgcactggcatgccacagcagcagagtgggggttcgtattatggggccacgtccgtacgacggtgatcgatccacaaggtctggccgaaaccaacgactttggaccgggcgacgtgtggtattttcctcgcggtcatgggcacatgctggaatgcctgggcgataaaccggcgcatttcattctgatcttcgataacggctacttctcagagtttggcaccttctctattactgactggatcggtcacacaccgaaagcgcttctcgccaagaactttaagctgcccgaaagcgcttttgatgggtttcccaaaaaagaggtctattttgcacgtggcgcggttccaccagccacccctgcagcgcctttacagggactgaagctgccaccactcacgcataaatacgaactcctcgaacaagggcctcataaagtttttaaaggtggtcgtgaatggcgcgtggatagcactcgttttcccatttccaagactgtaaccggcgttgttcttgatttggaacccggcgcgttacgcgagcttcactggcatcctaatgctgacgagtggcaatatgtgatcgatggcaacattagtgtgacgatgttcggttctcatggccgtgtacgcaccgaacagatggagaagggtgatgtcgggtatattccacaggggtatggccacagcatcgaaaatgttggagatcgtccttgtcgcgtcttgattggctttaacacaggtaactaccaagcgatcgacttatcacagtggattgcaggtaatcccgcggatgttcttgccacgaacttctccaaacccaccagcctctttgaaaagttcccaaaacaggacgtgtttattgctcctggcaag

SEQ ID NO: 996 - protein, 359 aa, synthetic construct
  REGION 1..359: note = Variant of oxalate decarboxylase from Gemmata sp. SH-PL17
MGDPTFMNNVPDPLLSGKDLPTFKFELEKSKGKVIGGSSGKEATVVQLPISKGIAGVSMVLEPGAMRELHWHATAAEWGFVLWGHVRTTVIDPQGLAETNDFGPGDVWYFPRGHGHMLECLGDKPAHFILIFDNGYFSEFGTFSITDWIGHTPKALLAKNFKLPESAFDGFPKKEVYFARGAVPPATPAAPLQGLKLPPLTHKYELLEQGPHKVFKGGREWRVDSTRFPISKTVTGVVLDLEPGALRELHWHPNADEWQYVIDGNISVTMFGSHGRVRTEQMEKGDVGYIPQGYGHSIENVGDRPCRVLIGFNTGNYQAIDLSQWIAGNPADVLATNFSKPTSLFEKFPKQDVFIAPGK

SEQ ID NO: 997 - DNA, 1077 bp, synthetic construct
  misc_feature 1..1077: note = Variant of oxalate decarboxylase from Gemmata sp. SH-PL17
  source 1..1077: mol_type = other DNA
atgggtgaccctacctttatgaacaatgtaccagaccctctgctgtcgggcaaagatttgccgacgttcaagtttgagctggaaaagagcaagggcaaagtcattggggggagttcgggaaaagaagcaaccgttgtccagttacctatctccaaaggcattgctggtgtgagcatgctgcttgaaccgggtgcgatgcgcgaattgcactggcatgccacagcagcagagtgggggttcgtattatggggccacgtccgtacgacggtgatcgatccacaaggtctggccgaaaccaacgactttggaccgggcgacgtgtggtattttcctcgcggtcatgggcacatgctggaatgcctgggcgataaaccggcgcatttcattctgatcttcgataacggctacttctcagagtttggcaccttctctattactgactggatcggtcacacaccgaaagcgcttctcgccaagaactttaagctgcccgaaagcgcttttgatgggtttcccaaaaaagaggtctattttgcacgtggcgcggttccaccagccacccctgcagcgcctttacagggactgaagctgccaccactcacgcataaatacgaactcctcgaacaagaacctcataaagtttttaaaggtggtcgtgaatggcgcgtggatagcactcgttttcccatttccaagactgtaaccggcgttgttcttgatttggaacccggcgcgttacgcgagcttcactggcatcctaatgctgacgagtggcaatatgtgatcgatggcaacattagtgtgacgatgttcggttctcatggccgtgtacgcaccgaacagatggagaagggtgatgtcgggtatattccacaggggtatggccacagcatcgaaaatgttggagatcgtccttgtcgcgtcttgattggctttaacacaggtaactaccaagcgatcgacttatcacagtggattgcaggtaatcccgcggatgttcttgccacgaacttctccaaacccaccagcctctttgaaaagttcccaaaacaggacgtgtttattgctcctggcaag

SEQ ID NO: 998 - protein, 359 aa, synthetic construct
  REGION 1..359: note = Variant of oxalate decarboxylase from Gemmata sp. SH-PL17
MGDPTFMNNVPDPLLSGKDLPTFKFELEKSKGKVIGGSSGKEATVVQLPISKGIAGVSMLLEPGAMRELHWHATAAEWGFVLWGHVRTTVIDPQGLAETNDFGPGDVWYFPRGHGHMLECLGDKPAHFILIFDNGYFSEFGTFSITDWIGHTPKALLAKNFKLPESAFDGFPKKEVYFARGAVPPATPAAPLQGLKLPPLTHKYELLEQEPHKVFKGGREWRVDSTRFPISKTVTGVVLDLEPGALRELHWHPNADEWQYVIDGNISVTMFGSHGRVRTEQMEKGDVGYIPQGYGHSIENVGDRPCRVLIGFNTGNYQAIDLSQWIAGNPADVLATNFSKPTSLFEKFPKQDVFIAPGK

SEQ ID NO: 999 - DNA, 1077 bp, synthetic construct
  misc_feature 1..1077: note = Variant of oxalate decarboxylase from Gemmata sp. SH-PL17
  source 1..1077: mol_type = other DNA
atgggtgaccctacctttatgaacaatgtaccagacctgctgctgtcgggcaaagatttgccgacgttcaagtttgagctggaaaagagcaagggcaaagtcattggggggagttcgggaaaagaagcaaccgttgtccagttacctatctccaaaggcattgctggtgtgagcatggtacttgaaccgggtgcgatgcgcgaattgcactggcatgccacagcagcagagtgggggttcgtattatggggccacgtccgtacgacggtgatcgatccacaaggtctggccgaaaccaacgactttggaccgggcgacgtgtggtattttcctcgcggtcatgggcacatgctggaatgcctgggcgataaaccggcgcatttcattctgatcttcgataacggctacttctcagagtttggcaccttctctattactgactggatcggtcacacaccgaaagcgcttctcgccaagaactttaagctgcccgaaagcgcttttgatgggtttcccaaaaaagaggtctattttgcacgtggcgcggttccaccagccacccctgcagcgcctttacagggactgaagctgccaccactcacgcataaatacgaactcctcgaacaagaacctcataaagtttttaaaggtggtcgtgaatggcgcgtggatagcactcgttttcccatttccaagactgtaaccggcgttgttcttgatttggaacccggcgcgttacgcgagcttcactggcatcctaatgctgacgagtggcaatatgtgatcgatggcaacattagtgtgacgatgttcggttctcatggccgtgtacgcaccgaacagatggagaagggtgatgtcgggtatattccacaggggtatggccacagcatcgaaaatgttggagatcgtccttgtcgcgtcttgattggctttaacacaggtaactaccaagcgatcgacttatcacagtggattgcaggtaatcccgcggatgttcttgccacgaacttctccaaacccaccagcctctttgaaaagttcccaaaacaggacgtgtttattgctcctggcaag

SEQ ID NO: 1000 - protein, 359 aa, synthetic construct
  REGION 1..359: note = Variant of oxalate decarboxylase from Gemmata sp. SH-PL17
MGDPTFMNNVPDLLLSGKDLPTFKFELEKSKGKVIGGSSGKEATVVQLPISKGIAGVSMVLEPGAMRELHWHATAAEWGFVLWGHVRTTVIDPQGLAETNDFGPGDVWYFPRGHGHMLECLGDKPAHFILIFDNGYFSEFGTFSITDWIGHTPKALLAKNFKLPESAFDGFPKKEVYFARGAVPPATPAAPLQGLKLPPLTHKYELLEQEPHKVFKGGREWRVDSTRFPISKTVTGVVLDLEPGALRELHWHPNADEWQYVIDGNISVTMFGSHGRVRTEQMEKGDVGYIPQGYGHSIENVGDRPCRVLIGFNTGNYQAIDLSQWIAGNPADVLATNFSKPTSLFEKFPKQDVFIAPGK

SEQ ID NO: 1001 - DNA, 1077 bp, synthetic construct
  misc_feature 1..1077: note = Variant of oxalate decarboxylase from Gemmata sp. SH-PL17
  source 1..1077: mol_type = other DNA
atgggtgaccctacctttatgaacaatgtaccagaccctctgctgtcgggcaaagatttgccgacgttcaagtttgagctggaaaagagcaagggcaaagtcattggggggagttcgggaaaagaagcaaccgttgtccagttacctatctccaaaggcattgctggtgtgagcatggtacttgaaccgggtgcgatgcgcgaattgcactggcatgccacagcagcagagtgggggttcgtattatatggccacgtccgtacgacggtgatcgatccacaaggtctggccgaaaccaacgactttggaccgggcgacgtgtggtattttcctcgcggtcatgggcacatgctggaatgcctgggcgataaaccggcgcatttcattctgatcttcgataacggctacttctcagagtttggcaccttctctattactgactggatcggtcacacaccgaaagcgcttctcgccaagaactttaagctgcccgaaagcgcttttgatgggtttcccaaaaaagaggtctattttgcacgtggcgcggttccaccagccacccctgcagcgcctttacagggactgaagctgccaccactcacgcataaatacgaactcctcgaacaagaacctcataaagtttttaaaggtggtcgtgaatggcgcgtggatagcactcgttttcccatttccaagactgtaaccggcgttgttcttgatttggaacccggcgcgttacgcgagcttcactggcatcctaatgctgacgagtggcaatatgtgatcgatggcaacattagtgtgacgatgttcggttctcatggccgtgtacgcaccgaacagatggagaagggtgatgtcgggtatattccacaggggtatggccacagcatcgaaaatgttggagatcgtccttgtcgcgtcttgattggctttaacacaggtaactaccaagcgatcgacttatcacagtggattgcaggtaatcccgcggatgttcttgccacgaacttctccaaacccaccagcctctttgaaaagttcccaaaacaggacgtgtttattgctcctggcaag

SEQ ID NO: 1002 - protein, 359 aa, synthetic construct
  REGION 1..359: note = Variant of oxalate decarboxylase from Gemmata sp. SH-PL17
MGDPTFMNNVPDPLLSGKDLPTFKFELEKSKGKVIGGSSGKEATVVQLPISKGIAGVSMVLEPGAMRELHWHATAAEWGFVLYGHVRTTVIDPQGLAETNDFGPGDVWYFPRGHGHMLECLGDKPAHFILIFDNGYFSEFGTFSITDWIGHTPKALLAKNFKLPESAFDGFPKKEVYFARGAVPPATPAAPLQGLKLPPLTHKYELLEQEPHKVFKGGREWRVDSTRFPISKTVTGVVLDLEPGALRELHWHPNADEWQYVIDGNISVTMFGSHGRVRTEQMEKGDVGYIPQGYGHSIENVGDRPCRVLIGFNTGNYQAIDLSQWIAGNPADVLATNFSKPTSLFEKFPKQDVFIAPGK

SEQ ID NO: 1003 - DNA, 1077 bp, synthetic construct
  misc_feature 1..1077: note = Variant of oxalate decarboxylase from Gemmata sp. SH-PL17
  source 1..1077: mol_type = other DNA
atgggtgaccctacctttatgaacaatgtaccagaccctctgctgtcgggcaaagatttgccgacgttcaagtttgagctggaaaagagcaagggcaaagtcattgggtggagttcgggaaaagaagcaaccgttgtccagttacctatctccaaaggcattgctggtgtgagcatggtacttgaaccgggtgcgatgcgcgaattgcactggcatgccacagcagcagagtgggggttcgtattatggggccacgtccgtacgacggtgatcgatccacaaggtctggccgaaaccaacgactttggaccgggcgacgtgtggtattttcctcgcggtcatgggcacatgctggaatgcctgggcgataaaccggcgcatttcattctgatcttcgataacggctacttctcagagtttggcaccttctctattactgactggatcggtcacacaccgaaagcgcttctcgccaagaactttaagctgcccgaaagcgcttttgatgggtttcccaaaaaagaggtctattttgcacgtggcgcggttccaccagccacccctgcagcgcctttacagggactgaagctgccaccactcacgcataaatacgaactcctcgaacaagaacctcataaagtttttaaaggtggtcgtgaatggcgcgtggatagcactcgttttcccatttccaagactgtaaccggcgttgttcttgatttggaacccggcgcgttacgcgagcttcactggcatcctaatgctgacgagtggcaatatgtgatcgatggcaacattagtgtgacgatgttcggttctcatggccgtgtacgcaccgaacagatggagaagggtgatgtcgggtatattccacaggggtatggccacagcatcgaaaatgttggagatcgtccttgtcgcgtcttgattggctttaacacaggtaactaccaagcgatcgacttatcacagtggattgcaggtaatcccgcggatgttcttgccacgaacttctccaaacccaccagcctctttgaaaagttcccaaaacaggacgtgtttattgctcctggcaag

SEQ ID NO: 1004 - protein, 359 aa, synthetic construct
  REGION 1..359: note = Variant of oxalate decarboxylase from Gemmata sp. SH-PL17
MGDPTFMNNVPDPLLSGKDLPTFKFELEKSKGKVIGWSSGKEATVVQLPISKGIAGVSMVLEPGAMRELHWHATAAEWGFVLWGHVRTTVIDPQGLAETNDFGPGDVWYFPRGHGHMLECLGDKPAHFILIFDNGYFSEFGTFSITDWIGHTPKALLAKNFKLPESAFDGFPKKEVYFARGAVPPATPAAPLQGLKLPPLTHKYELLEQEPHKVFKGGREWRVDSTRFPISKTVTGVVLDLEPGALRELHWHPNADEWQYVIDGNISVTMFGSHGRVRTEQMEKGDVGYIPQGYGHSIENVGDRPCRVLIGFNTGNYQAIDLSQWIAGNPADVLATNFSKPTSLFEKFPKQDVFIAPGK

SEQ ID NO: 1005 - DNA, 1077 bp, synthetic construct
  misc_feature 1..1077: note = Variant of oxalate decarboxylase from Gemmata sp. SH-PL17
  source 1..1077: mol_type = other DNA
atgggtgaccctacctttatgaacaatgtaccagaccctctgctgtcgggcaaagatttgccgacgttcaagtttgagctggaaaagagcaagggcaaagtcattggggggagttcgggaaaagaagcaaccgttgtccagttacctatctccaaaggcattgctggtgtgagcatggtacttgaaccgggtgcgatgcgcgaattgcactggcatgccacagcagcagagtgggggttcgtattatggggccacgtccgtacgacggtgatcgatccacaaggtctggccgaaaccaacgactttggaccgggcgacgtgtggtattttcctcgcggtcatgggcacatgctggaatgcctgggcgataaaccggcgcatttcattctgatcttcgataacggctacttctcagagtttggcaccttctctattactgactggatcggtcacacaccgaaagcgcttctcgccaagaactttaagctgcccgaaagcgcttttgatgggtttcccaaaaaagaggtctattttgcacgtggcgcggttccaccagccacccctgcagcgcctttacagggactgaagctgccaccactcacgcataaatacgaactcctcgaacaagaacctcataaagtttttaaaggtggtcgtgaatggcgcgtggatagcactcgttttcccatttccaagactgtaaccggcgttgttcttgatttggaacccggcgcgttacgcgagcttcactggcatcctaatgctgacgagtggcaatatgtgatcgatggcaacattagtgtgacgatgttcggttctcatggccgtgggcgcaccgaacagatggagaagggtgatgtcgggtatattccacaggggtatggccacagcatcgaaaatgttggagatcgtccttgtcgcgtcttgattggctttaacacaggtaactaccaagcgatcgacttatcacagtggattgcaggtaatcccgcggatgttcttgccacgaacttctccaaacccaccagcctctttgaaaagttcccaaaacaggacgtgtttattgctcctggcaag

SEQ ID NO: 1006 - protein, 359 aa, synthetic construct
  REGION 1..359: note = Variant of oxalate decarboxylase from Gemmata sp. SH-PL17
MGDPTFMNNVPDPLLSGKDLPTFKFELEKSKGKVIGGSSGKEATVVQLPISKGIAGVSMVLEPGAMRELHWHATAAEWGFVLWGHVRTTVIDPQGLAETNDFGPGDVWYFPRGHGHMLECLGDKPAHFILIFDNGYFSEFGTFSITDWIGHTPKALLAKNFKLPESAFDGFPKKEVYFARGAVPPATPAAPLQGLKLPPLTHKYELLEQEPHKVFKGGREWRVDSTRFPISKTVTGVVLDLEPGALRELHWHPNADEWQYVIDGNISVTMFGSHGRGRTEQMEKGDVGYIPQGYGHSIENVGDRPCRVLIGFNTGNYQAIDLSQWIAGNPADVLATNFSKPTSLFEKFPKQDVFIAPGK

SEQ ID NO: 1007 - DNA, 1077 bp, synthetic construct
  misc_feature 1..1077: note = Variant of oxalate decarboxylase from Gemmata sp. SH-PL17
  source 1..1077: mol_type = other DNA
atgggtgaccctacctttatgaacaatgtaccagaccctctgctgtcgggcaaagatttgccgacgttcaagtttgagctggaaaagagcaagggcaaagtcattggggggagttcgggaaaagaagcaaccgttgtccagttacctatctccaaaggcattgctggtgtgagcatggtacttgaaccgggtgcgatgcgcgaattgcactggcatgccacagcagcagagtgggggttcgtattaaggggccacgtccgtacgacggtgatcgatccacaaggtctggccgaaaccaacgactttggaccgggcgacgtgtggtattttcctcgcggtcatgggcacatgctggaatgcctgggcgataaaccggcgcatttcattctgatcttcgataacggctacttctcagagtttggcaccttctctattactgactggatcggtcacacaccgaaagcgcttctcgccaagaactttaagctgcccgaaagcgcttttgatgggtttcccaaaaaagaggtctattttgcacgtggcgcggttccaccagccacccctgcagcgcctttacagggactgaagctgccaccactcacgcataaatacgaactcctcgaacaagaacctcataaagtttttaaaggtggtcgtgaatggcgcgtggatagcactcgttttcccatttccaagactgtaaccggcgttgttcttgatttggaacccggcgcgttacgcgagcttcactggcatcctaatgctgacgagtggcaatatgtgatcgatggcaacattagtgtgacgatgttcggttctcatggccgtgtacgcaccgaacagatggagaagggtgatgtcgggtatattccacaggggtatggccacagcatcgaaaatgttggagatcgtccttgtcgcgtcttgattggctttaacacaggtaactaccaagcgatcgacttatcacagtggattgcaggtaatcccgcggatgttcttgccacgaacttctccaaacccaccagcctctttgaaaagttcccaaaacaggacgtgtttattgctcctggcaag

SEQ ID NO: 1008 - protein, 359 aa, synthetic construct
  REGION 1..359: note = Variant of oxalate decarboxylase from Gemmata sp. SH-PL17
MGDPTFMNNVPDPLLSGKDLPTFKFELEKSKGKVIGGSSGKEATVVQLPISKGIAGVSMVLEPGAMRELHWHATAAEWGFVLRGHVRTTVIDPQGLAETNDFGPGDVWYFPRGHGHMLECLGDKPAHFILIFDNGYFSEFGTFSITDWIGHTPKALLAKNFKLPESAFDGFPKKEVYFARGAVPPATPAAPLQGLKLPPLTHKYELLEQEPHKVFKGGREWRVDSTRFPISKTVTGVVLDLEPGALRELHWHPNADEWQYVIDGNISVTMFGSHGRVRTEQMEKGDVGYIPQGYGHSIENVGDRPCRVLIGFNTGNYQAIDLSQWIAGNPADVLATNFSKPTSLFEKFPKQDVFIAPGK

SEQ ID NO: 1009 - DNA, 1077 bp, synthetic construct
  misc_feature 1..1077: note = Variant of oxalate decarboxylase from Gemmata sp. SH-PL17
  source 1..1077: mol_type = other DNA
atgggtgaccctacctttatgaacaatgtaccagaccctctgctgtcgggcaaagatttgccgacgttcaagtttgagctggaaaagagcaagggcaaagtcattggggggagttcgggaaaagaagcaaccgttgtccagttacctatctccaaaggcattgctggtgtgagcatgtatcttgaaccgggtgcgatgcgcgaattgcactggcatgccacagcagcagagtgggggttcgtattatggggccacgtccgtacgacggtgatcgatccacaaggtctggccgaaaccaacgactttggaccgggcgacgtgtggtattttcctcgcggtcatgggcacatgctggaatgcctgggcgataaaccggcgcatttcattctgatcttcgataacggctacttctcagagtttggcaccttctctattactgactggatcggtcacacaccgaaagcgcttctcgccaagaactttaagctgcccgaaagcgcttttgatgggtttcccaaaaaagaggtctattttgcacgtggcgcggttccaccagccacccctgcagcgcctttacagggactgaagctgccaccactcacgcataaatacgaactcctcgaacaagaacctcataaagtttttaaaggtggtcgtgaatggcgcgtggatagcactcgttttcccatttccaagactgtaaccggcgttgttcttgatttggaacccggcgcgttacgcgagcttcactggcatcctaatgctgacgagtggcaatatgtgatcgatggcaacattagtgtgacgatgttcggttctcatggccgtgtacgcaccgaacagatggagaagggtgatgtcgggtatattccacaggggtatggccacagcatcgaaaatgttggagatcgtccttgtcgcgtcttgattggctttaacacaggtaactaccaagcgatcgacttatcacagtggattgcaggtaatcccgcggatgttcttgccacgaacttctccaaacccaccagcctctttgaaaagttcccaaaacaggacgtgtttattgctcctggcaag

SEQ ID NO: 1010 - protein, 359 aa, synthetic construct
  REGION 1..359: note = Variant of oxalate decarboxylase from Gemmata sp. SH-PL17
MGDPTFMNNVPDPLLSGKDLPTFKFELEKSKGKVIGGSSGKEATVVQLPISKGIAGVSMYLEPGAMRELHWHATAAEWGFVLWGHVRTTVIDPQGLAETNDFGPGDVWYFPRGHGHMLECLGDKPAHFILIFDNGYFSEFGTFSITDWIGHTPKALLAKNFKLPESAFDGFPKKEVYFARGAVPPATPAAPLQGLKLPPLTHKYELLEQEPHKVFKGGREWRVDSTRFPISKTVTGVVLDLEPGALRELHWHPNADEWQYVIDGNISVTMFGSHGRVRTEQMEKGDVGYIPQGYGHSIENVGDRPCRVLIGFNTGNYQAIDLSQWIAGNPADVLATNFSKPTSLFEKFPKQDVFIAPGK

SEQ ID NO: 1011 - DNA, 1077 bp, synthetic construct
  misc_feature 1..1077: note = Variant of oxalate decarboxylase from Gemmata sp. SH-PL17
  source 1..1077: mol_type = other DNA
atgggtgaccctacctttatgaacaatgtaccagaccctctgctgtcgggcaaagatttgccgacgttcaagtttgagctggaaaagagcaagggcaaagtcattggggggagttcgggaaaagaagcaaccgttgtccagttacctatctccaaaggcattgctggtgtgagcatggtacttgaaccgggtgcgatgcgcgaattgcactggcatgccacagcagcagagtgggggttcgtattatggggccacgtccgtacgacggtgatcgatccacaaggtctggccgaaaccaacgactttggaccgggcgacgtgtggtattttcctcgcggtcatgggcacatgctggaatgcctgggcgataaaccggcgcatttcattctgatcttcgataacggctacttctcagagtttggcaccttctctattactgactggatcggtcacacaccgaaagcgcttctcgccaagaactttaagctgcccgaaagcgcttttgatgggtttcccaaaaaagaggtctattttgcacgtggcgcggttccaccagccacccctgcagcgcctttacagggactgaagctgccaccactcacgcataaatacgaactcctcgaacaatcgcctcataaagtttttaaaggtggtcgtgaatggcgcgtggatagcactcgttttcccatttccaagactgtaaccggcgttgttcttgatttggaacccggcgcgttacgcgagcttcactggcatcctaatgctgacgagtggcaatatgtgatcgatggcaacattagtgtgacgatgttcggttctcatggccgtgtacgcaccgaacagatggagaagggtgatgtcgggtatattccacaggggtatggccacagcatcgaaaatgttggagatcgtccttgtcgcgtcttgattggctttaacacaggtaactaccaagcgatcgacttatcacagtggattgcaggtaatcccgcggatgttcttgccacgaacttctccaaacccaccagcctctttgaaaagttcccaaaacaggacgtgtttattgctcctggcaag

SEQ ID NO: 1012 - protein, 359 aa, synthetic construct
  REGION 1..359: note = Variant of oxalate decarboxylase from Gemmata sp. SH-PL17
MGDPTFMNNVPDPLLSGKDLPTFKFELEKSKGKVIGGSSGKEATVVQLPISKGIAGVSMVLEPGAMRELHWHATAAEWGFVLWGHVRTTVIDPQGLAETNDFGPGDVWYFPRGHGHMLECLGDKPAHFILIFDNGYFSEFGTFSITDWIGHTPKALLAKNFKLPESAFDGFPKKEVYFARGAVPPATPAAPLQGLKLPPLTHKYELLEQSPHKVFKGGREWRVDSTRFPISKTVTGVVLDLEPGALRELHWHPNADEWQYVIDGNISVTMFGSHGRVRTEQMEKGDVGYIPQGYGHSIENVGDRPCRVLIGFNTGNYQAIDLSQWIAGNPADVLATNFSKPTSLFEKFPKQDVFIAPGK

SEQ ID NO: 1013 - DNA, 1077 bp, synthetic construct
  misc_feature 1..1077: note = Variant of oxalate decarboxylase from Gemmata sp. SH-PL17
  source 1..1077: mol_type = other DNA
atgggtgaccctacctttatgaacaatgtaccagaccctctgctgtcgggcaaagatttgccgacgttcaagtttgagctggaaaagagcaagggcaaagtcattggggggagttcgggaaaagaagcaaccgttgtccagttacctatctccaaaggcattgctggtgtgagcatggtacttgaaccgggtgcgatgcgcgaattgcactggcatgccacagcagcagagtgggggttcgtattatggggccacgtccgtacgacggtgatcgatccacaaggtctggccgaaaccaacgactttggaccgggcgacgtgtggtattttcctcgcggtcatgggcacatgctggaatgcctgggcgataaaccggcgcatttcattctgatcttcgataacggctacttctcagagtttggcaccttctctattactgactggatcggtcacacaccgaaagcgcttctcgccaagaactttaagctgcccgaaagcgcttttgatgggtttcccaaaaaagaggtctattttgcacgtggcgcggttccaccagccacccctgcagcgcctttacagggactgaagctgccaccactcacgcataaatacgaactcctcgaacaagaacctcataaagtttttaaaggtggtcgtgaatggcgcgtggatagcactcgttttcccatttccaagactgtaaccggcgttgttcttgatttggaacccggcgcgttacgcgagcttcactggcatcctaatgctgacgagtggcaatatgtgatcgatggcaacattagtgtgacgatgttcggttctcatggccgtgtacgcaccgaacagatggagaagggtgatgtcgggtatattccacaggggtatggccacagcatcgaaaatgttggagatcgtccttgtcgcgtcttgattggctttaacacaggtaactactctgcgatcgacttatcacagtggattgcaggtaatcccgcggatgttcttgccacgaacttctccaaacccaccagcctctttgaaaagttcccaaaacaggacgtgtttattgctcctggcaag

SEQ ID NO: 1014 - protein, 359 aa, synthetic construct
  REGION 1..359: note = Variant of oxalate decarboxylase from Gemmata sp. SH-PL17
MGDPTFMNNVPDPLLSGKDLPTFKFELEKSKGKVIGGSSGKEATVVQLPISKGIAGVSMVLEPGAMRELHWHATAAEWGFVLWGHVRTTVIDPQGLAETNDFGPGDVWYFPRGHGHMLECLGDKPAHFILIFDNGYFSEFGTFSITDWIGHTPKALLAKNFKLPESAFDGFPKKEVYFARGAVPPATPAAPLQGLKLPPLTHKYELLEQEPHKVFKGGREWRVDSTRFPISKTVTGVVLDLEPGALRELHWHPNADEWQYVIDGNISVTMFGSHGRVRTEQMEKGDVGYIPQGYGHSIENVGDRPCRVLIGFNTGNYSAIDLSQWIAGNPADVLATNFSKPTSLFEKFPKQDVFIAPGK

SEQ ID NO: 1015 - DNA, 1077 bp, synthetic construct
  misc_feature 1..1077: note = Variant of oxalate decarboxylase from Gemmata sp. SH-PL17
  source 1..1077: mol_type = other DNA
atgggtgaccctacctttatgaacaatgtaccagaccctctgctgtcgattaaagatttgccgacgttcaagtttgagctggaaaagagcaagggcaaagtcattggggggagttcgggaaaagaagcaaccgttgtccagttacctatctccaaaggcattgctggtgtgagcatggtacttgaaccgggtgcgatgcgcgaattgcactggcatgccacagcagcagagtgggggttcgtattatggggccacgtccgtacgacggtgatcgatccacaaggtctggccgaaaccaacgactttggaccgggcgacgtgtggtattttcctcgcggtcatgggcacatgctggaatgcctgggcgataaaccggcgcatttcattctgatcttcgataacggctacttctcagagtttggcaccttctctattactgactggatcggtcacacaccgaaagcgcttctcgccaagaactttaagctgcccgaaagcgcttttgatgggtttcccaaaaaagaggtctattttgcacgtggcgcggttccaccagccacccctgcagcgcctttacagggactgaagctgccaccactcacgcataaatacgaactcctcgaacaagaacctcataaagtttttaaaggtggtcgtgaatggcgcgtggatagcactcgttttcccatttccaagactgtaaccggcgttgttcttgatttggaacccggcgcgttacgcgagcttcactggcatcctaatgctgacgagtggcaatatgtgatcgatggcaacattagtgtgacgatgttcggttctcatggccgtgtacgcaccgaacagatggagaagggtgatgtcgggtatattccacaggggtatggccacagcatcgaaaatgttggagatcgtccttgtcgcgtcttgattggctttaacacaggtaactaccaagcgatcgacttatcacagtggattgcaggtaatcccgcggatgttcttgccacgaacttctccaaacccaccagcctctttgaaaagttcccaaaacaggacgtgtttattgctcctggcaag

SEQ ID NO: 1016 - protein, 359 aa, synthetic construct
  REGION 1..359: note = Variant of oxalate decarboxylase from Gemmata sp. SH-PL17
MGDPTFMNNVPDPLLSIKDLPTFKFELEKSKGKVIGGSSGKEATVVQLPISKGIAGVSMVLEPGAMRELHWHATAAEWGFVLWGHVRTTVIDPQGLAETNDFGPGDVWYFPRGHGHMLECLGDKPAHFILIFDNGYFSEFGTFSITDWIGHTPKALLAKNFKLPESAFDGFPKKEVYFARGAVPPATPAAPLQGLKLPPLTHKYELLEQEPHKVFKGGREWRVDSTRFPISKTVTGVVLDLEPGALRELHWHPNADEWQYVIDGNISVTMFGSHGRVRTEQMEKGDVGYIPQGYGHSIENVGDRPCRVLIGFNTGNYQAIDLSQWIAGNPADVLATNFSKPTSLFEKFPKQDVFIAPGK

SEQ ID NO: 1017 - DNA, 1077 bp, synthetic construct
  misc_feature 1..1077: note = Variant of oxalate decarboxylase from Gemmata sp. SH-PL17
  source 1..1077: mol_type = other DNA
atgggtgaccctacctttatgaacaatgtaccagaccctctgctgtcgggcaaagatttgccgacgttcaagtttgagctggaaaagagcaagggcaaagtcattgggagtagttcgggaaaagaagcaaccgttgtccagttacctatctccaaaggcattgctggtgtgagcatggtacttgaaccgggtgcgatgcgcgaattgcactggcatgccacagcagcagagtgggggttcgtattatggggccacgtccgtacgacggtgatcgatccacaaggtctggccgaaaccaacgactttggaccgggcgacgtgtggtattttcctcgcggtcatgggcacatgctggaatgcctgggcgataaaccggcgcatttcattctgatcttcgataacggctacttctcagagtttggcaccttctctattactgactggatcggtcacacaccgaaagcgcttctcgccaagaactttaagctgcccgaaagcgcttttgatgggtttcccaaaaaagaggtctattttgcacgtggcgcggttccaccagccacccctgcagcgcctttacagggactgaagctgccaccactcacgcataaatacgaactcctcgaacaagaacctcataaagtttttaaaggtggtcgtgaatggcgcgtggatagcactcgttttcccatttccaagactgtaaccggcgttgttcttgatttggaacccggcgcgttacgcgagcttcactggcatcctaatgctgacgagtggcaatatgtgatcgatggcaacattagtgtgacgatgttcggttctcatggccgtgtacgcaccgaacagatggagaagggtgatgtcgggtatattccacaggggtatggccacagcatcgaaaatgttggagatcgtccttgtcgcgtcttgattggctttaacacaggtaactaccaagcgatcgacttatcacagtggattgcaggtaatcccgcggatgttcttgccacgaacttctccaaacccaccagcctctttgaaaagttcccaaaacaggacgtgtttattgctcctggcaag

SEQ ID NO: 1018 - protein, 359 aa, synthetic construct
  REGION 1..359: note = Variant of oxalate decarboxylase from Gemmata sp. SH-PL17
MGDPTFMNNVPDPLLSGKDLPTFKFELEKSKGKVIGSSSGKEATVVQLPISKGIAGVSMVLEPGAMRELHWHATAAEWGFVLWGHVRTTVIDPQGLAETNDFGPGDVWYFPRGHGHMLECLGDKPAHFILIFDNGYFSEFGTFSITDWIGHTPKALLAKNFKLPESAFDGFPKKEVYFARGAVPPATPAAPLQGLKLPPLTHKYELLEQEPHKVFKGGREWRVDSTRFPISKTVTGVVLDLEPGALRELHWHPNADEWQYVIDGNISVTMFGSHGRVRTEQMEKGDVGYIPQGYGHSIENVGDRPCRVLIGFNTGNYQAIDLSQWIAGNPADVLATNFSKPTSLFEKFPKQDVFIAPGK

SEQ ID NO: 1019 - DNA, 1077 bp, synthetic construct
  misc_feature 1..1077: note = Variant of oxalate decarboxylase from Gemmata sp. SH-PL17
  source 1..1077: mol_type = other DNA
atgggtgaccctacctttatgaacaatgtaccagaccctctgctgtcgggcaaagatttgccgacgttcaagtttgagctggaaaagagcaagggcaaagtcattggggggagttcgggaaaagaagcaaccgttgtccagttacctatctccaaaggcattgctggtgtgagcatggtacttgaaccgggtgcgatgcgcgaattgcactggcatgccacagcagcagagtggttgttcgtattatggggccacgtccgtacgacggtgatcgatccacaaggtctggccgaaaccaacgactttggaccgggcgacgtgtggtattttcctcgcggtcatgggcacatgctggaatgcctgggcgataaaccggcgcatttcattctgatcttcgataacggctacttctcagagtttggcaccttctctattactgactggatcggtcacacaccgaaagcgcttctcgccaagaactttaagctgcccgaaagcgcttttgatgggtttcccaaaaaagaggtctattttgcacgtggcgcggttccaccagccacccctgcagcgcctttacagggactgaagctgccaccactcacgcataaatacgaactcctcgaacaagaacctcataaagtttttaaaggtggtcgtgaatggcgcgtggatagcactcgttttcccatttccaagactgtaaccggcgttgttcttgatttggaacccggcgcgttacgcgagcttcactggcatcctaatgctgacgagtggcaatatgtgatcgatggcaacattagtgtgacgatgttcggttctcatggccgtgtacgcaccgaacagatggagaagggtgatgtcgggtatattccacaggggtatggccacagcatcgaaaatgttggagatcgtccttgtcgcgtcttgattggctttaacacaggtaactaccaagcgatcgacttatcacagtggattgcaggtaatcccgcggatgttcttgccacgaacttctccaaacccaccagcctctttgaaaagttcccaaaacaggacgtgtttattgctcctggcaag

SEQ ID NO: 1020 - protein, 359 aa, synthetic construct
  REGION 1..359: note = Variant of oxalate decarboxylase from Gemmata sp. SH-PL17
MGDPTFMNNVPDPLLSGKDLPTFKFELEKSKGKVIGGSSGKEATVVQLPISKGIAGVSMVLEPGAMRELHWHATAAEWLFVLWGHVRTTVIDPQGLAETNDFGPGDVWYFPRGHGHMLECLGDKPAHFILIFDNGYFSEFGTFSITDWIGHTPKALLAKNFKLPESAFDGFPKKEVYFARGAVPPATPAAPLQGLKLPPLTHKYELLEQEPHKVFKGGREWRVDSTRFPISKTVTGVVLDLEPGALRELHWHPNADEWQYVIDGNISVTMFGSHGRVRTEQMEKGDVGYIPQGYGHSIENVGDRPCRVLIGFNTGNYQAIDLSQWIAGNPADVLATNFSKPTSLFEKFPKQDVFIAPGK

SEQ ID NO: 1021 - DNA, 1077 bp, synthetic construct
  misc_feature 1..1077: note = Variant of oxalate decarboxylase from Gemmata sp. SH-PL17
  source 1..1077: mol_type = other DNA
atgggtgaccctacctttatgaacaatgtaccagaccctctgctgaggggcaaagatttgccgacgttcaagtttgagctggaaaagagcaagggcaaagtcattggggggagttcgggaaaagaagcaaccgttgtccagttacctatctccaaaggcattgctggtgtgagcatggtacttgaaccgggtgcgatgcgcgaattgcactggcatgccacagcagcagagtgggggttcgtattatggggccacgtccgtacgacggtgatcgatccacaaggtctggccgaaaccaacgactttggaccgggcgacgtgtggtattttcctcgcggtcatgggcacatgctggaatgcctgggcgataaaccggcgcatttcattctgatcttcgataacggctacttctcagagtttggcaccttctctattactgactggatcggtcacacaccgaaagcgcttctcgccaagaactttaagctgcccgaaagcgcttttgatgggtttcccaaaaaagaggtctattttgcacgtggcgcggttccaccagccacccctgcagcgcctttacagggactgaagctgccaccactcacgcataaatacgaactcctcgaacaagaacctcataaagtttttaaaggtggtcgtgaatggcgcgtggatagcactcgttttcccatttccaagactgtaaccggcgttgttcttgatttggaacccggcgcgttacgcgagcttcactggcatcctaatgctgacgagtggcaatatgtgatcgatggcaacattagtgtgacgatgttcggttctcatggccgtgtacgcaccgaacagatggagaagggtgatgtcgggtatattccacaggggtatggccacagcatcgaaaatgttggagatcgtccttgtcgcgtcttgattggctttaacacaggtaactaccaagcgatcgacttatcacagtggattgcaggtaatcccgcggatgttcttgccacgaacttctccaaacccaccagcctctttgaaaagttcccaaaacaggacgtgtttattgctcctggcaag

SEQ ID NO: 1022 - protein, 359 aa, synthetic construct
  REGION 1..359: note = Variant of oxalate decarboxylase from Gemmata sp. SH-PL17
MGDPTFMNNVPDPLLRGKDLPTFKFELEKSKGKVIGGSSGKEATVVQLPISKGIAGVSMVLEPGAMRELHWHATAAEWGFVLWGHVRTTVIDPQGLAETNDFGPGDVWYFPRGHGHMLECLGDKPAHFILIFDNGYFSEFGTFSITDWIGHTPKALLAKNFKLPESAFDGFPKKEVYFARGAVPPATPAAPLQGLKLPPLTHKYELLEQEPHKVFKGGREWRVDSTRFPISKTVTGVVLDLEPGALRELHWHPNADEWQYVIDGNISVTMFGSHGRVRTEQMEKGDVGYIPQGYGHSIENVGDRPCRVLIGFNTGNYQAIDLSQWIAGNPADVLATNFSKPTSLFEKFPKQDVFIAPGK

SEQ ID NO: 1023 - DNA, 1077 bp, synthetic construct
  misc_feature 1..1077: note = Variant of oxalate decarboxylase from Gemmata sp. SH-PL17
  source 1..1077: mol_type = other DNA
atgggtgaccctacctttatgaacaatgtaccagaccctctgctgtcgggcaaagatttgccgacgttcaagtttgagctggaaaagagcaagggcaaagtcattggggggagttcgggaaaagaagcaaccgttgtccagttacctatctccaaaggcattgctggtgtgagcatggtacttgaaccgggtgcgatgcgcgaattgcactggcatgccacagcagcagagtgggggttcgtattatggggccacgtccgtacgacggtgatcgatccacaaggtctggccgaaaccaacgactttggaccgggcgacgtgtggtattttcctcgcggtcatgggcacatgctggaatgcctgggcgataaaccggcgcatttcattctgatcttcgataacggctacttctcagagtttggcaccttctctattactgactggatcggtcacacaccgaaagcgcttctcgccaagaactttaagctgcccgaaagcgcttttgatgggtttcccaaaaaagaggtctattttgcacgtggcgcggttccaccagccacccctgcagcgcctttacagggatcgaagctgccaccactcacgcataaatacgaactcctcgaacaagaacctcataaagtttttaaaggtggtcgtgaatggcgcgtggatagcactcgttttcccatttccaagactgtaaccggcgttgttcttgatttggaacccggcgcgttacgcgagcttcactggcatcctaatgctgacgagtggcaatatgtgatcgatggcaacattagtgtgacgatgttcggttctcatggccgtgtacgcaccgaacagatggagaagggtgatgtcgggtatattccacaggggtatggccacagcatcgaaaatgttggagatcgtccttgtcgcgtcttgattggctttaacacaggtaactaccaagcgatcgacttatcacagtggattgcaggtaatcccgcggatgttcttgccacgaacttctccaaacccaccagcctctttgaaaagttcccaaaacaggacgtgtttattgctcctggcaag

SEQ ID NO: 1024 - protein, 359 aa, synthetic construct
  REGION 1..359: note = Variant of oxalate decarboxylase from Gemmata sp. SH-PL17
MGDPTFMNNVPDPLLSGKDLPTFKFELEKSKGKVIGGSSGKEATVVQLPISKGIAGVSMVLEPGAMRELHWHATAAEWGFVLWGHVRTTVIDPQGLAETNDFGPGDVWYFPRGHGHMLECLGDKPAHFILIFDNGYFSEFGTFSITDWIGHTPKALLAKNFKLPESAFDGFPKKEVYFARGAVPPATPAAPLQGSKLPPLTHKYELLEQEPHKVFKGGREWRVDSTRFPISKTVTGVVLDLEPGALRELHWHPNADEWQYVIDGNISVTMFGSHGRVRTEQMEKGDVGYIPQGYGHSIENVGDRPCRVLIGFNTGNYQAIDLSQWIAGNPADVLATNFSKPTSLFEKFPKQDVFIAPGK

SEQ ID NO: 1025 - DNA, 1077 bp, synthetic construct
  misc_feature 1..1077: note = Variant of oxalate decarboxylase from Gemmata sp. SH-PL17
  source 1..1077: mol_type = other DNA
atgggtgaccctacctttatgaacaatgtaccagaccctctgctgtcgggcaaagatttgccgacgttcaagtttgagctggaaaagagcaagggcaaagtcattggggggagttcgggaaaagaagcaaccgttgtccagttacctatctccaaaggcattgctggtgtgagcatggtacttgaaccgggtgcgatgcgcgaattgcactggcatgccacagcagcagagtgggggttcgtattatggggccacgtccgtacgacggtgatcgatccacaaggtctggccgaaaccaacgactttggaccgggcgacgtgtggtattttcctcgcggtcatgggcacatgctggaatgcctgggcgataaaccggcgcatttcattctgatcttcgataacggctacttctcagagtttggcaccttctctattactgactggatcggtcacacaccgaaagcgcttctcgccaagaactttaagctgcccgaaagcgcttttgatgggtttcccaaaaaagaggtctattttgcacgtggcgcggttccaccagccacccctgcagcgcctttacagggactgaagctgccaccactcacgcataaatacgaactcctcgaacaagaacctcataaagtttttaaaggtggtcgtgaatggcgcgtggatagcactcgttttcccatttccaagactgtaaccggcgttgttcttgatttggaacccggcgcgttacgcgagcttcactggcatcctaatgctgacgagtggcaatatgtgatcgatggcaacattagtgtgacgatgttcggttctcatggccgtgtacgcaccgaacagatggagaagggtgatgtcgggtatattccacaggggtatggccacagcatcgaaaatgttggagatcgtccttgtcgcgtcttgattggctttaacacaggtaactacggggcgatcgacttatcacagtggattgcaggtaatcccgcggatgttcttgccacgaacttctccaaacccaccagcctctttgaaaagttcccaaaacaggacgtgtttattgctcctggcaag

SEQ ID NO: 1026 - protein, 359 aa, synthetic construct
  REGION 1..359: note = Variant of oxalate decarboxylase from Gemmata sp. SH-PL17
MGDPTFMNNVPDPLLSGKDLPTFKFELEKSKGKVIGGSSGKEATVVQLPISKGIAGVSMVLEPGAMRELHWHATAAEWGFVLWGHVRTTVIDPQGLAETNDFGPGDVWYFPRGHGHMLECLGDKPAHFILIFDNGYFSEFGTFSITDWIGHTPKALLAKNFKLPESAFDGFPKKEVYFARGAVPPATPAAPLQGLKLPPLTHKYELLEQEPHKVFKGGREWRVDSTRFPISKTVTGVVLDLEPGALRELHWHPNADEWQYVIDGNISVTMFGSHGRVRTEQMEKGDVGYIPQGYGHSIENVGDRPCRVLIGFNTGNYGAIDLSQWIAGNPADVLATNFSKPTSLFEKFPKQDVFIAPGK

SEQ ID NO: 1027 - DNA, 1077 bp, synthetic construct
  misc_feature 1..1077: note = Variant of oxalate decarboxylase from Gemmata sp. SH-PL17
  source 1..1077: mol_type = other DNA
atgggtgaccctacctttatgaacaatgtaccagaccctctgctgtcgggcaaagatttgccgacgttcaagttttgtctggaaaagagcaagggcaaagtcattggggggagttcgggaaaagaagcaaccgttgtccagttacctatctccaaaggcattgctggtgtgagcatggtacttgaaccgggtgcgatgcgcgaattgcactggcatgccacagcagcagagtgggggttcgtattatggggccacgtccgtacgacggtgatcgatccacaaggtctggccgaaaccaacgactttggaccgggcgacgtgtggtattttcctcgcggtcatgggcacatgctggaatgcctgggcgataaaccggcgcatttcattctgatcttcgataacggctacttctcagagtttggcaccttctctattactgactggatcggtcacacaccgaaagcgcttctcgccaagaactttaagctgcccgaaagcgcttttgatgggtttcccaaaaaagaggtctattttgcacgtggcgcggttccaccagccacccctgcagcgcctttacagggactgaagctgccaccactcacgcataaatacgaactcctcgaacaagaacctcataaagtttttaaaggtggtcgtgaatggcgcgtggatagcactcgttttcccatttccaagactgtaaccggcgttgttcttgatttggaacccggcgcgttacgcgagcttcactggcatcctaatgctgacgagtggcaatatgtgatcgatggcaacattagtgtgacgatgttcggttctcatggccgtgtacgcaccgaacagatggagaagggtgatgtcgggtatattccacaggggtatggccacagcatcgaaaatgttggagatcgtccttgtcgcgtcttgattggctttaacacaggtaactaccaagcgatcgacttatcacagtggattgcaggtaatcccgcggatgttcttgccacgaacttctccaaacccaccagcctctttgaaaagttcccaaaacaggacgtgtttattgctcctggcaag

SEQ ID NO: 1028 - protein, 359 aa, synthetic construct
  REGION 1..359: note = Variant of oxalate decarboxylase from Gemmata sp. SH-PL17
MGDPTFMNNVPDPLLSGKDLPTFKFCLEKSKGKVIGGSSGKEATVVQLPISKGIAGVSMVLEPGAMRELHWHATAAEWGFVLWGHVRTTVIDPQGLAETNDFGPGDVWYFPRGHGHMLECLGDKPAHFILIFDNGYFSEFGTFSITDWIGHTPKALLAKNFKLPESAFDGFPKKEVYFARGAVPPATPAAPLQGLKLPPLTHKYELLEQEPHKVFKGGREWRVDSTRFPISKTVTGVVLDLEPGALRELHWHPNADEWQYVIDGNISVTMFGSHGRVRTEQMEKGDVGYIPQGYGHSIENVGDRPCRVLIGFNTGNYQAIDLSQWIAGNPADVLATNFSKPTSLFEKFPKQDVFIAPGK

SEQ ID NO: 1029 - DNA, 1077 bp, synthetic construct
  misc_feature 1..1077: note = Variant of oxalate decarboxylase from Gemmata sp. SH-PL17
  source 1..1077: mol_type = other DNA
atgggtgaccctacctttatgaacaatgtaccagacaggctgctgtcgggcaaagatttgccgacgttcaagtttgagctggaaaagagcaagggcaaagtcattggggggagttcgggaaaagaagcaaccgttgtccagttacctatctccaaaggcattgctggtgtgagcatggtacttgaaccgggtgcgatgcgcgaattgcactggcatgccacagcagcagagtgggggttcgtattatggggccacgtccgtacgacggtgatcgatccacaaggtctggccgaaaccaacgactttggaccgggcgacgtgtggtattttcctcgcggtcatgggcacatgctggaatgcctgggcgataaaccggcgcatttcattctgatcttcgataacggctacttctcagagtttggcaccttctctattactgactggatcggtcacacaccgaaagcgcttctcgccaagaactttaagctgcccgaaagcgcttttgatgggtttcccaaaaaagaggtctattttgcacgtggcgcggttccaccagccacccctgcagcgcctttacagggactgaagctgccaccactcacgcataaatacgaactcctcgaacaagaacctcataaagtttttaaaggtggtcgtgaatggcgcgtggatagcactcgttttcccatttccaagactgtaaccggcgttgttcttgatttggaacccggcgcgttacgcgagcttcactggcatcctaatgctgacgagtggcaatatgtgatcgatggcaacattagtgtgacgatgttcggttctcatggccgtgtacgcaccgaacagatggagaagggtgatgtcgggtatattccacaggggtatggccacagcatcgaaaatgttggagatcgtccttgtcgcgtcttgattggctttaacacaggtaactaccaagcgatcgacttatcacagtggattgcaggtaatcccgcggatgttcttgccacgaacttctccaaacccaccagcctctttgaaaagttcccaaaacaggacgtgtttattgctcctggcaag

SEQ ID NO: 1030 - protein, 359 aa, synthetic construct
  REGION 1..359: note = Variant of oxalate decarboxylase from Gemmata sp. SH-PL17
MGDPTFMNNVPDRLLSGKDLPTFKFELEKSKGKVIGGSSGKEATVVQLPISKGIAGVSMVLEPGAMRELHWHATAAEWGFVLWGHVRTTVIDPQGLAETNDFGPGDVWYFPRGHGHMLECLGDKPAHFILIFDNGYFSEFGTFSITDWIGHTPKALLAKNFKLPESAFDGFPKKEVYFARGAVPPATPAAPLQGLKLPPLTHKYELLEQEPHKVFKGGREWRVDSTRFPISKTVTGVVLDLEPGALRELHWHPNADEWQYVIDGNISVTMFGSHGRVRTEQMEKGDVGYIPQGYGHSIENVGDRPCRVLIGFNTGNYQAIDLSQWIAGNPADVLATNFSKPTSLFEKFPKQDVFIAPGK

SEQ ID NO: 1031 - DNA, 1077 bp, synthetic construct
  misc_feature 1..1077: note = Variant of oxalate decarboxylase from Gemmata sp. SH-PL17
  source 1..1077: mol_type = other DNA
atgggtgaccctacctttatgaacaatgtaccagaccctctgctgtcgggcaaagatttgccgacgttcaagtttgagctggaaaagagcaagggcaaagtcattggggggagttcgggaaaagaagcaaccgttgtccagttacctatctccaaaggcattgctggtgtgagcatggtacttgaaccgggtgcgatgcgcgaattgcactggcatgccacagcagcagagtgggggttcgtattatggggccacgtccgtacgacggtgatcgatccacaaggtctggccgaaaccaacgactttggaccgggcgacgtgtggtattttcctcgcggtcatgggcacatgctggaatgcctgggcgataaaccggcgcatttcattctgatcttcgataacggctacttctcagagtttggcaccttctctattactgactggatcggtcacacaccgaaagcgcttctcgccaagaactttaagctgcccgaaagcgcttttgatgggtttcccaaaaaagaggtctattttgcacgtggcgcggttccaccagccacccctgcagcgcctttacagggatataagctgccaccactcacgcataaatacgaactcctcgaacaagaacctcataaagtttttaaaggtggtcgtgaatggcgcgtggatagcactcgttttcccatttccaagactgtaaccggcgttgttcttgatttggaacccggcgcgttacgcgagcttcactggcatcctaatgctgacgagtggcaatatgtgatcgatggcaacattagtgtgacgatgttcggttctcatggccgtgtacgcaccgaacagatggagaagggtgatgtcgggtatattccacaggggtatggccacagcatcgaaaatgttggagatcgtccttgtcgcgtcttgattggctttaacacaggtaactaccaagcgatcgacttatcacagtggattgcaggtaatcccgcggatgttcttgccacgaacttctccaaacccaccagcctctttgaaaagttcccaaaacaggacgtgtttattgctcctggcaag

SEQ ID NO: 1032 - protein, 359 aa, synthetic construct
  REGION 1..359: note = Variant of oxalate decarboxylase from Gemmata sp. SH-PL17
MGDPTFMNNVPDPLLSGKDLPTFKFELEKSKGKVIGGSSGKEATVVQLPISKGIAGVSMVLEPGAMRELHWHATAAEWGFVLWGHVRTTVIDPQGLAETNDFGPGDVWYFPRGHGHMLECLGDKPAHFILIFDNGYFSEFGTFSITDWIGHTPKALLAKNFKLPESAFDGFPKKEVYFARGAVPPATPAAPLQGYKLPPLTHKYELLEQEPHKVFKGGREWRVDSTRFPISKTVTGVVLDLEPGALRELHWHPNADEWQYVIDGNISVTMFGSHGRVRTEQMEKGDVGYIPQGYGHSIENVGDRPCRVLIGFNTGNYQAIDLSQWIAGNPADVLATNFSKPTSLFEKFPKQDVFIAPGK

SEQ ID NO: 1033 - DNA, 1077 bp, synthetic construct
  misc_feature 1..1077: note = Variant of oxalate decarboxylase from Gemmata sp. SH-PL17
  source 1..1077: mol_type = other DNA
atgggtgaccctacctttatgaacaatgtaccagaccctctgctgtcgggcaaagatttgccgacgttcaagtttgagctggaaaagagcaagggcaaagtcattggggggagttcgggaaaagaagcaaccgttgtccagttacctatctccaaaggcattgctggtgtgagcatggagcttgaaccgggtgcgatgcgcgaattgcactggcatgccacagcagcagagtgggggttcgtattatggggccacgtccgtacgacggtgatcgatccacaaggtctggccgaaaccaacgactttggaccgggcgacgtgtggtattttcctcgcggtcatgggcacatgctggaatgcctgggcgataaaccggcgcatttcattctgatcttcgataacggctacttctcagagtttggcaccttctctattactgactggatcggtcacacaccgaaagcgcttctcgccaagaactttaagctgcccgaaagcgcttttgatgggtttcccaaaaaagaggtctattttgcacgtggcgcggttccaccagccacccctgcagcgcctttacagggactgaagctgccaccactcacgcataaatacgaactcctcgaacaagaacctcataaagtttttaaaggtggtcgtgaatggcgcgtggatagcactcgttttcccatttccaagactgtaaccggcgttgttcttgatttggaacccggcgcgttacgcgagcttcactggcatcctaatgctgacgagtggcaatatgtgatcgatggcaacattagtgtgacgatgttcggttctcatggccgtgtacgcaccgaacagatggagaagggtgatgtcgggtatattccacaggggtatggccacagcatcgaaaatgttggagatcgtccttgtcgcgtcttgattggctttaacacaggtaactaccaagcgatcgacttatcacagtggattgcaggtaatcccgcggatgttcttgccacgaacttctccaaacccaccagcctctttgaaaagttcccaaaacaggacgtgtttattgctcctggcaag

SEQ ID NO: 1034 - protein, 359 aa, synthetic construct
  REGION 1..359: note = Variant of oxalate decarboxylase from Gemmata sp. SH-PL17
MGDPTFMNNVPDPLLSGKDLPTFKFELEKSKGKVIGGSSGKEATVVQLPISKGIAGVSMELEPGAMRELHWHATAAEWGFVLWGHVRTTVIDPQGLAETNDFGPGDVWYFPRGHGHMLECLGDKPAHFILIFDNGYFSEFGTFSITDWIGHTPKALLAKNFKLPESAFDGFPKKEVYFARGAVPPATPAAPLQGLKLPPLTHKYELLEQEPHKVFKGGREWRVDSTRFPISKTVTGVVLDLEPGALRELHWHPNADEWQYVIDGNISVTMFGSHGRVRTEQMEKGDVGYIPQGYGHSIENVGDRPCRVLIGFNTGNYQAIDLSQWIAGNPADVLATNFSKPTSLFEKFPKQDVFIAPGK

SEQ ID NO: 1035 - DNA, 1077 bp, synthetic construct
  misc_feature 1..1077: note = Variant of oxalate decarboxylase from Gemmata sp. SH-PL17
  source 1..1077: mol_type = other DNA
atgggtgaccctacctttatgaacaatgtaccagaccctctgctgtcgggcaaagatttgccgacgttcaagtttgagctggaaaagagcaagggcaaagtcattggggggagttcgggaaaagaagcaaccgttgtccagttacctatctccaaaggcattgctggtgtgagcatggtacttgaaccgggtgcgatgcgcgaattgcactggcatgccacagcagcagagtgggggttcgtattatggggccacgtccgtacgacggtgatcgatccacaaggtctggccgaaaccaacgactttggaccgggcgacgtgtggtattttcctcgcggtcatgggcacatgctggaatgcctgggcgataaaccggcgcatttcattctgatcttcgataacggctacttctcagagtttggcaccttctctattactgactggatcggtcacacaccgaaagcgcttctcgccaagaactttgtgctgcccgaaagcgcttttgatgggtttcccaaaaaagaggtctattttgcacgtggcgcggttccaccagccacccctgcagcgcctttacagggactgaagctgccaccactcacgcataaatacgaactcctcgaacaagaacctcataaagtttttaaaggtggtcgtgaatggcgcgtggatagcactcgttttcccatttccaagactgtaaccggcgttgttcttgatttggaacccggcgcgttacgcgagcttcactggcatcctaatgctgacgagtggcaatatgtgatcgatggcaacattagtgtgacgatgttcggttctcatggccgtgtacgcaccgaacagatggagaagggtgatgtcgggtatattccacaggggtatggccacagcatcgaaaatgttggagatcgtccttgtcgcgtcttgattggctttaacacaggtaactaccaagcgatcgacttatcacagtggattgcaggtaatcccgcggatgttcttgccacgaacttctccaaacccaccagcctctttgaaaagttcccaaaacaggacgtgtttattgctcctggcaag

SEQ ID NO: 1036 - protein, 359 aa, synthetic construct
  REGION 1..359: note = Variant of oxalate decarboxylase from Gemmata sp. SH-PL17
MGDPTFMNNVPDPLLSGKDLPTFKFELEKSKGKVIGGSSGKEATVVQLPISKGIAGVSMVLEPGAMRELHWHATAAEWGFVLWGHVRTTVIDPQGLAETNDFGPGDVWYFPRGHGHMLECLGDKPAHFILIFDNGYFSEFGTFSITDWIGHTPKALLAKNFVLPESAFDGFPKKEVYFARGAVPPATPAAPLQGLKLPPLTHKYELLEQEPHKVFKGGREWRVDSTRFPISKTVTGVVLDLEPGALRELHWHPNADEWQYVIDGNISVTMFGSHGRVRTEQMEKGDVGYIPQGYGHSIENVGDRPCRVLIGFNTGNYQAIDLSQWIAGNPADVLATNFSKPTSLFEKFPKQDVFIAPGK

SEQ ID NO: 1037 - DNA, 1077 bp, synthetic construct
  misc_feature 1..1077: note = Variant of oxalate decarboxylase from Gemmata sp. SH-PL17
  source 1..1077: mol_type = other DNA
atgggtgaccctacctttatgaacaatgtaccagaccctctgctgtgtggcaaagatttgccgacgttcaagtttgagctggaaaagagcaagggcaaagtcattggggggagttcgggaaaagaagcaaccgttgtccagttacctatctccaaaggcattgctggtgtgagcatggtacttgaaccgggtgcgatgcgcgaattgcactggcatgccacagcagcagagtgggggttcgtattatggggccacgtccgtacgacggtgatcgatccacaaggtctggccgaaaccaacgactttggaccgggcgacgtgtggtattttcctcgcggtcatgggcacatgctggaatgcctgggcgataaaccggcgcatttcattctgatcttcgataacggctacttctcagagtttggcaccttctctattactgactggatcggtcacacaccgaaagcgcttctcgccaagaactttaagctgcccgaaagcgcttttgatgggtttcccaaaaaagaggtctattttgcacgtggcgcggttccaccagccacccctgcagcgcctttacagggactgaagctgccaccactcacgcataaatacgaactcctcgaacaagaacctcataaagtttttaaaggtggtcgtgaatggcgcgtggatagcactcgttttcccatttccaagactgtaaccggcgttgttcttgatttggaacccggcgcgttacgcgagcttcactggcatcctaatgctgacgagtggcaatatgtgatcgatggcaacattagtgtgacgatgttcggttctcatggccgtgtacgcaccgaacagatggagaagggtgatgtcgggtatattccacaggggtatggccacagcatcgaaaatgttggagatcgtccttgtcgcgtcttgattggctttaacacaggtaactaccaagcgatcgacttatcacagtggattgcaggtaatcccgcggatgttcttgccacgaacttctccaaacccaccagcctctttgaaaagttcccaaaacaggacgtgtttattgctcctggcaag

SEQ ID NO: 1038 - protein, 359 aa, synthetic construct
  REGION 1..359: note = Variant of oxalate decarboxylase from Gemmata sp. SH-PL17
MGDPTFMNNVPDPLLCGKDLPTFKFELEKSKGKVIGGSSGKEATVVQLPISKGIAGVSMVLEPGAMRELHWHATAAEWGFVLWGHVRTTVIDPQGLAETNDFGPGDVWYFPRGHGHMLECLGDKPAHFILIFDNGYFSEFGTFSITDWIGHTPKALLAKNFKLPESAFDGFPKKEVYFARGAVPPATPAAPLQGLKLPPLTHKYELLEQEPHKVFKGGREWRVDSTRFPISKTVTGVVLDLEPGALRELHWHPNADEWQYVIDGNISVTMFGSHGRVRTEQMEKGDVGYIPQGYGHSIENVGDRPCRVLIGFNTGNYQAIDLSQWIAGNPADVLATNFSKPTSLFEKFPKQDVFIAPGK

SEQ ID NO: 1039 - DNA, 1077 bp, synthetic construct
  misc_feature 1..1077: note = Variant of oxalate decarboxylase from Gemmata sp. SH-PL17
  source 1..1077: mol_type = other DNA
atgggtgaccctacctttatgaacaatgtaccagaccctctgctgtcgggcaaagatttgccgacgttcaagtttgagctggaaaagagcaagggcaaagtcattggggggagttcgggaaaagaagcaaccgttgtccagttacctatctccaaaggcattgctggtgtgagcatggtacttgaaccgggtgcgatgcgcgaattgcactggcatgccacagcagcagagtgggggttcgtattatggggccacgtccgtacgacggtgatcgatccacaaggtgtggccgaaaccaacgactttggaccgggcgacgtgtggtattttcctcgcggtcatgggcacatgctggaatgcctgggcgataaaccggcgcatttcattctgatcttcgataacggctacttctcagagtttggcaccttctctattactgactggatcggtcacacaccgaaagcgcttctcgccaagaactttaagctgcccgaaagcgcttttgatgggtttcccaaaaaagaggtctattttgcacgtggcgcggttccaccagccacccctgcagcgcctttacagggactgaagctgccaccactcacgcataaatacgaactcctcgaacaagaacctcataaagtttttaaaggtggtcgtgaatggcgcgtggatagcactcgttttcccatttccaagactgtaaccggcgttgttcttgatttggaacccggcgcgttacgcgagcttcactggcatcctaatgctgacgagtggcaatatgtgatcgatggcaacattagtgtgacgatgttcggttctcatggccgtgtacgcaccgaacagatggagaagggtgatgtcgggtatattccacaggggtatggccacagcatcgaaaatgttggagatcgtccttgtcgcgtcttgattggctttaacacaggtaactaccaagcgatcgacttatcacagtggattgcaggtaatcccgcggatgttcttgccacgaacttctccaaacccaccagcctctttgaaaagttcccaaaacaggacgtgtttattgctcctggcaag

SEQ ID NO: 1040 - protein, 359 aa, synthetic construct
  REGION 1..359: note = Variant of oxalate decarboxylase from Gemmata sp. SH-PL17
MGDPTFMNNVPDPLLSGKDLPTFKFELEKSKGKVIGGSSGKEATVVQLPISKGIAGVSMVLEPGAMRELHWHATAAEWGFVLWGHVRTTVIDPQGVAETNDFGPGDVWYFPRGHGHMLECLGDKPAHFILIFDNGYFSEFGTFSITDWIGHTPKALLAKNFKLPESAFDGFPKKEVYFARGAVPPATPAAPLQGLKLPPLTHKYELLEQEPHKVFKGGREWRVDSTRFPISKTVTGVVLDLEPGALRELHWHPNADEWQYVIDGNISVTMFGSHGRVRTEQMEKGDVGYIPQGYGHSIENVGDRPCRVLIGFNTGNYQAIDLSQWIAGNPADVLATNFSKPTSLFEKFPKQDVFIAPGK

SEQ ID NO: 1041 - DNA, 1077 bp, synthetic construct
  misc_feature 1..1077: note = Variant of oxalate decarboxylase from Gemmata sp. SH-PL17
  source 1..1077: mol_type = other DNA
atgggtgaccctacctttatgaacaatgtaccagaccctctgctgtcgggcaaagatttgccgacgttcaagtttgagctggaaaagagcaagggcaaagtcattggggggagttcgggaaaagaagcaaccgttgtccagttacctatctccaaaggcattgctggtgtgagcatggtacttgaaccgggtgcgatgcgcgaattgcactggcatgccacagcagcagagtgggggttcgtattaatgggccacgtccgtacgacggtgatcgatccacaaggtctggccgaaaccaacgactttggaccgggcgacgtgtggtattttcctcgcggtcatgggcacatgctggaatgcctgggcgataaaccggcgcatttcattctgatcttcgataacggctacttctcagagtttggcaccttctctattactgactggatcggtcacacaccgaaagcgcttctcgccaagaactttaagctgcccgaaagcgcttttgatgggtttcccaaaaaagaggtctattttgcacgtggcgcggttccaccagccacccctgcagcgcctttacagggactgaagctgccaccactcacgcataaatacgaactcctcgaacaagaacctcataaagtttttaaaggtggtcgtgaatggcgcgtggatagcactcgttttcccatttccaagactgtaaccggcgttgttcttgatttggaacccggcgcgttacgcgagcttcactggcatcctaatgctgacgagtggcaatatgtgatcgatggcaacattagtgtgacgatgttcggttctcatggccgtgtacgcaccgaacagatggagaagggtgatgtcgggtatattccacaggggtatggccacagcatcgaaaatgttggagatcgtccttgtcgcgtcttgattggctttaacacaggtaactaccaagcgatcgacttatcacagtggattgcaggtaatcccgcggatgttcttgccacgaacttctccaaacccaccagcctctttgaaaagttcccaaaacaggacgtgtttattgctcctggcaag

SEQ ID NO: 1042 - protein, 359 aa, synthetic construct
  REGION 1..359: note = Variant of oxalate decarboxylase from Gemmata sp. SH-PL17
MGDPTFMNNVPDPLLSGKDLPTFKFELEKSKGKVIGGSSGKEATVVQLPISKGIAGVSMVLEPGAMRELHWHATAAEWGFVLMGHVRTTVIDPQGLAETNDFGPGDVWYFPRGHGHMLECLGDKPAHFILIFDNGYFSEFGTFSITDWIGHTPKALLAKNFKLPESAFDGFPKKEVYFARGAVPPATPAAPLQGLKLPPLTHKYELLEQEPHKVFKGGREWRVDSTRFPISKTVTGVVLDLEPGALRELHWHPNADEWQYVIDGNISVTMFGSHGRVRTEQMEKGDVGYIPQGYGHSIENVGDRPCRVLIGFNTGNYQAIDLSQWIAGNPADVLATNFSKPTSLFEKFPKQDVFIAPGK

SEQ ID NO: 1043 - DNA, 1077 bp, synthetic construct
  misc_feature 1..1077: note = Variant of oxalate decarboxylase from Gemmata sp. SH-PL17
  source 1..1077: mol_type = other DNA
atgggtgaccctacctttatgaacaatgtaccagaccctctgctgtcgggcaaagatttgccgacgttcaagtttgagctggaaaagagcatgggcaaagtcattggggggagttcgggaaaagaagcaaccgttgtccagttacctatctccaaaggcattgctggtgtgagcatggtacttgaaccgggtgcgatgcgcgaattgcactggcatgccacagcagcagagtgggggttcgtattatggggccacgtccgtacgacggtgatcgatccacaaggtctggccgaaaccaacgactttggaccgggcgacgtgtggtattttcctcgcggtcatgggcacatgctggaatgcctgggcgataaaccggcgcatttcattctgatcttcgataacggctacttctcagagtttggcaccttctctattactgactggatcggtcacacaccgaaagcgcttctcgccaagaactttaagctgcccgaaagcgcttttgatgggtttcccaaaaaagaggtctattttgcacgtggcgcggttccaccagccacccctgcagcgcctttacagggactgaagctgccaccactcacgcataaatacgaactcctcgaacaagaacctcataaagtttttaaaggtggtcgtgaatggcgcgtggatagcactcgttttcccatttccaagactgtaaccggcgttgttcttgatttggaacccggcgcgttacgcgagcttcactggcatcctaatgctgacgagtggcaatatgtgatcgatggcaacattagtgtgacgatgttcggttctcatggccgtgtacgcaccgaacagatggagaagggtgatgtcgggtatattccacaggggtatggccacagcatcgaaaatgttggagatcgtccttgtcgcgtcttgattggctttaacacaggtaactaccaagcgatcgacttatcacagtggattgcaggtaatcccgcggatgttcttgccacgaacttctccaaacccaccagcctctttgaaaagttcccaaaacaggacgtgtttattgctcctggcaag

SEQ ID NO: 1044 - protein, 359 aa, synthetic construct
  REGION 1..359: note = Variant of oxalate decarboxylase from Gemmata sp. SH-PL17
MGDPTFMNNVPDPLLSGKDLPTFKFELEKSMGKVIGGSSGKEATVVQLPISKGIAGVSMVLEPGAMRELHWHATAAEWGFVLWGHVRTTVIDPQGLAETNDFGPGDVWYFPRGHGHMLECLGDKPAHFILIFDNGYFSEFGTFSITDWIGHTPKALLAKNFKLPESAFDGFPKKEVYFARGAVPPATPAAPLQGLKLPPLTHKYELLEQEPHKVFKGGREWRVDSTRFPISKTVTGVVLDLEPGALRELHWHPNADEWQYVIDGNISVTMFGSHGRVRTEQMEKGDVGYIPQGYGHSIENVGDRPCRVLIGFNTGNYQAIDLSQWIAGNPADVLATNFSKPTSLFEKFPKQDVFIAPGK

SEQ ID NO: 1045 - DNA, 1077 bp, synthetic construct
  misc_feature 1..1077: note = Variant of oxalate decarboxylase from Gemmata sp. SH-PL17
  source 1..1077: mol_type = other DNA
atgggtgaccctacctttatgaacaatgtaccagaccctctgctgtcgggcaaagatttgccgacgttcaagtttgagctggaaaagagcaagggcaaagtcattggggggagttcgggaaaagaagcaaccgttgtccagttacctatctccaaaggcattgctggtgtgagcatggtacttgaaccgggtgcgatgcgcgaattgcactggcatgccacagcagcagagtgggggttcgtattatggggccacgtccgtacgacggtgatcgatccacaaggtctggccgaaaccaacgactttggaccgggcgacgtgtggtattttcctcgcggtcatgggcacatgctggaatgcctgggcgataaaccggcgcatttcattctgatcttcgataacggctacttctcagagtttggcaccttctctattactgactggatcggtcacacaccgaaagcgcttctcgccaagaactttaagctgcccgaaagcgcttttgatgggtttcccaaagtggaggtctattttgcacgtggcgcggttccaccagccacccctgcagcgcctttacagggactgaagctgccaccactcacgcataaatacgaactcctcgaacaagaacctcataaagtttttaaaggtggtcgtgaatggcgcgtggatagcactcgttttcccatttccaagactgtaaccggcgttgttcttgatttggaacccggcgcgttacgcgagcttcactggcatcctaatgctgacgagtggcaatatgtgatcgatggcaacattagtgtgacgatgttcggttctcatggccgtgtacgcaccgaacagatggagaagggtgatgtcgggtatattccacaggggtatggccacagcatcgaaaatgttggagatcgtccttgtcgcgtcttgattggctttaacacaggtaactaccaagcgatcgacttatcacagtggattgcaggtaatcccgcggatgttcttgccacgaacttctccaaacccaccagcctctttgaaaagttcccaaaacaggacgtgtttattgctcctggcaag

SEQ ID NO: 1046 - protein, 359 aa, synthetic construct
  REGION 1..359: note = Variant of oxalate decarboxylase from Gemmata sp. SH-PL17
MGDPTFMNNVPDPLLSGKDLPTFKFELEKSKGKVIGGSSGKEATVVQLPISKGIAGVSMVLEPGAMRELHWHATAAEWGFVLWGHVRTTVIDPQGLAETNDFGPGDVWYFPRGHGHMLECLGDKPAHFILIFDNGYFSEFGTFSITDWIGHTPKALLAKNFKLPESAFDGFPKVEVYFARGAVPPATPAAPLQGLKLPPLTHKYELLEQEPHKVFKGGREWRVDSTRFPISKTVTGVVLDLEPGALRELHWHPNADEWQYVIDGNISVTMFGSHGRVRTEQMEKGDVGYIPQGYGHSIENVGDRPCRVLIGFNTGNYQAIDLSQWIAGNPADVLATNFSKPTSLFEKFPKQDVFIAPGK

SEQ ID NO: 1047 - DNA, 1077 bp, synthetic construct
  misc_feature 1..1077: note = Variant of oxalate decarboxylase from Gemmata sp. SH-PL17
  source 1..1077: mol_type = other DNA
atgggtgaccctacctttatgaacaatgtaccagaccctctgctgtcgggcaaagatttgccgacgttcaagtttgagctggaaaagagcaagggcaaagtcattggggggagttcgggaaaagaagcaaccgttgtccagttacctatctccaaaggcattgctggtgtgagcatggtacttgaaccgggtgcgatgcgcgaattgcactggcatgccacagcagcagagtgggggttcgtattatggggccacgtccgtacgacggtgatcgatccacaaggtctggccgaaaccaacgactttggaccgggcgacgtgtggtattttcctcgcggtcatgggcacatgctggaatgcctgggcgataaaccggcgcatttcattctgatcttcgataacggctacttctcagagtttggcaccttctctattactgactggatcggtcacacaccgaaagcgcttctcgccaagaactttaagctgcccgaaagcgcttttgatgggtttcccaaaaaagaggtctattttgcacgtggcgcggttccaccagccacccctgcagcgcctttacagggactgaagctgccaccactcacgcataaatacgaactcctcgaacaagaacctcataaagtttttaaaggtggtcgtgaatggcgcgtggatagcactcgttttcccatttccaagactgtaaccggcgttgttcttgatttggaacccggcgcgttacgcgagcttcactggcatcctaatgctgacgagtggcaatatgtgatcgatggcaacattagtgtgacgatgttcggttctcatggccgtttgcgcaccgaacagatggagaagggtgatgtcgggtatattccacaggggtatggccacagcatcgaaaatgttggagatcgtccttgtcgcgtcttgattggctttaacacaggtaactaccaagcgatcgacttatcacagtggattgcaggtaatcccgcggatgttcttgccacgaacttctccaaacccaccagcctctttgaaaagttcccaaaacaggacgtgtttattgctcctggcaag

SEQ ID NO: 1048 - protein, 359 aa, synthetic construct
  REGION 1..359: note = Variant of oxalate decarboxylase from Gemmata sp. SH-PL17
MGDPTFMNNVPDPLLSGKDLPTFKFELEKSKGKVIGGSSGKEATVVQLPISKGIAGVSMVLEPGAMRELHWHATAAEWGFVLWGHVRTTVIDPQGLAETNDFGPGDVWYFPRGHGHMLECLGDKPAHFILIFDNGYFSEFGTFSITDWIGHTPKALLAKNFKLPESAFDGFPKKEVYFARGAVPPATPAAPLQGLKLPPLTHKYELLEQEPHKVFKGGREWRVDSTRFPISKTVTGVVLDLEPGALRELHWHPNADEWQYVIDGNISVTMFGSHGRLRTEQMEKGDVGYIPQGYGHSIENVGDRPCRVLIGFNTGNYQAIDLSQWIAGNPADVLATNFSKPTSLFEKFPKQDVFIAPGK

SEQ ID NO: 1049 - DNA, 1077 bp, synthetic construct
  misc_feature 1..1077: note = Variant of oxalate decarboxylase from Gemmata sp. SH-PL17
  source 1..1077: mol_type = other DNA
atgggtgaccctacctttatgaacaatgtaccagaccctctgctgtcgggcaaagatttgccgacgttcaagtttatgctggaaaagagcaagggcaaagtcattggggggagttcgggaaaagaagcaaccgttgtccagttacctatctccaaaggcattgctggtgtgagcatggtacttgaaccgggtgcgatgcgcgaattgcactggcatgccacagcagcagagtgggggttcgtattatggggccacgtccgtacgacggtgatcgatccacaaggtctggccgaaaccaacgactttggaccgggcgacgtgtggtattttcctcgcggtcatgggcacatgctggaatgcctgggcgataaaccggcgcatttcattctgatcttcgataacggctacttctcagagtttggcaccttctctattactgactggatcggtcacacaccgaaagcgcttctcgccaagaactttaagctgcccgaaagcgcttttgatgggtttcccaaaaaagaggtctattttgcacgtggcgcggttccaccagccacccctgcagcgcctttacagggactgaagctgccaccactcacgcataaatacgaactcctcgaacaagaacctcataaagtttttaaaggtggtcgtgaatggcgcgtggatagcactcgttttcccatttccaagactgtaaccggcgttgttcttgatttggaacccggcgcgttacgcgagcttcactggcatcctaatgctgacgagtggcaatatgtgatcgatggcaacattagtgtgacgatgttcggttctcatggccgtgtacgcaccgaacagatggagaagggtgatgtcgggtatattccacaggggtatggccacagcatcgaaaatgttggagatcgtccttgtcgcgtcttgattggctttaacacaggtaactaccaagcgatcgacttatcacagtggattgcaggtaatcccgcggatgttcttgccacgaacttctccaaacccaccagcctctttgaaaagttcccaaaacaggacgtgtttattgctcctggcaag

SEQ ID NO: 1050 - protein, 359 aa, synthetic construct
  REGION 1..359: note = Variant of oxalate decarboxylase from Gemmata sp. SH-PL17
MGDPTFMNNVPDPLLSGKDLPTFKFMLEKSKGKVIGGSSGKEATVVQLPISKGIAGVSMVLEPGAMRELHWHATAAEWGFVLWGHVRTTVIDPQGLAETNDFGPGDVWYFPRGHGHMLECLGDKPAHFILIFDNGYFSEFGTFSITDWIGHTPKALLAKNFKLPESAFDGFPKKEVYFARGAVPPATPAAPLQGLKLPPLTHKYELLEQEPHKVFKGGREWRVDSTRFPISKTVTGVVLDLEPGALRELHWHPNADEWQYVIDGNISVTMFGSHGRVRTEQMEKGDVGYIPQGYGHSIENVGDRPCRVLIGFNTGNYQAIDLSQWIAGNPADVLATNFSKPTSLFEKFPKQDVFIAPGK

SEQ ID NO: 1051 - DNA, 1077 bp, synthetic construct
  misc_feature 1..1077: note = Variant of oxalate decarboxylase from Gemmata sp. SH-PL17
  source 1..1077: mol_type = other DNA
atgggtgaccctacctttatgaacaatgtaccagaccctctgctgtcgggcaaagatttgccgacgttcaagtttgagctggaaaagagcaagggcaaagtcattggggggagttcgggaaaagaagcaaccgttgtccagttacctatctccaaaggcattgctggtgtgagcatggtacttgaaccgggtgcgatgcgcgaattgcactggcatgccacagcagcagagtgggggttcgtattatggggccacgtccgtacgacggtgatcgatccacaaggtctggccgaaaccaacgactttggaccgggcgacgtgtggtattttcctcgcggtcatgggcacatgctggaatgcctgggcgataaaccggcgcatttcattctgatcttcgataacggctacttctcagagtttggcaccttctctattactgactggatcggtcacacaccgaaagcgcttctcgccaagaactttaagctgcccgaaagcgcttttgatgggtttcccaaaaaagaggtctattttgcacgtggcgcggttccaccagccacccctgcagcgcctttacagggactgaagctgccaccactcacgcataaatacgaactcctcgaacaagaacctcataaagtttttaaaggtggtcgtgaatggcgcgtggatagcactcgttttcccatttccaagactgtaaccggcgttgttcttgatttggaacccggcgcgttacgcgagcttcactggcatcctaatgctgacgagtggcaatatgtgatcgatggcaacattagtgtgacgatgttcggttctcatggccgtgtacgcaccgaacagatggagaagggtgatgtcgggtatattccacaggggtatggccacagcatcgaaaatgttggagatcgtccttgtcgcgtcttgattggctttaacacaggtaactacatggcgatcgacttatcacagtggattgcaggtaatcccgcggatgttcttgccacgaacttctccaaacccaccagcctctttgaaaagttcccaaaacaggacgtgtttattgctcctggcaag

SEQ ID NO: 1052 - protein, 359 aa, synthetic construct
  REGION 1..359: note = Variant of oxalate decarboxylase from Gemmata sp. SH-PL17
MGDPTFMNNVPDPLLSGKDLPTFKFELEKSKGKVIGGSSGKEATVVQLPISKGIAGVSMVLEPGAMRELHWHATAAEWGFVLWGHVRTTVIDPQGLAETNDFGPGDVWYFPRGHGHMLECLGDKPAHFILIFDNGYFSEFGTFSITDWIGHTPKALLAKNFKLPESAFDGFPKKEVYFARGAVPPATPAAPLQGLKLPPLTHKYELLEQEPHKVFKGGREWRVDSTRFPISKTVTGVVLDLEPGALRELHWHPNADEWQYVIDGNISVTMFGSHGRVRTEQMEKGDVGYIPQGYGHSIENVGDRPCRVLIGFNTGNYMAIDLSQWIAGNPADVLATNFSKPTSLFEKFPKQDVFIAPGK

SEQ ID NO: 1053 - DNA, 1077 bp, synthetic construct
  misc_feature 1..1077: note = Variant of oxalate decarboxylase from Gemmata sp. SH-PL17
  source 1..1077: mol_type = other DNA
atgggtgaccctacctttatgaacaatgtaccagaccctctgctgtcgggcaaagatttgccgacgttcaagtttgagctggaaaagagcaagggcaaagtcattggggggagttcgggaaaagaagcaaccgttgtccagttacctatctccaaaggcattgctggtgtgagcatggtacttgaaccgggtgcgatgcgcgaattgcactggcatgccacagcagcagagtgggggttcgtattatggggccacgtccgtacgacggtgatcgatccacaaggtctggccgaaaccaacgactttggaccgggcgacgtgtggtattttcctcgcggtcatgggcacatgctggaatgcctgggcgataaaccggcgcatttcattctgatcttcgataacggctacttctcagagtttggcaccttctctattactgactggatcggtcacacaccgaaagcgcttctcgccaagaactttaagctgcccgaaagcgcttttgatgggtttcccaaaaaagaggtctattttgcacgtggcgcggttccaccagccacccctgcagcgcctttacagggactgaagctgccaccactcacgcataaatacgaactcctcgaacaaaatcctcataaagtttttaaaggtggtcgtgaatggcgcgtggatagcactcgttttcccatttccaagactgtaaccggcgttgttcttgatttggaacccggcgcgttacgcgagcttcactggcatcctaatgctgacgagtggcaatatgtgatcgatggcaacattagtgtgacgatgttcggttctcatggccgtgtacgcaccgaacagatggagaagggtgatgtcgggtatattccacaggggtatggccacagcatcgaaaatgttggagatcgtccttgtcgcgtcttgattggctttaacacaggtaactaccaagcgatcgacttatcacagtggattgcaggtaatcccgcggatgttcttgccacgaacttctccaaacccaccagcctctttgaaaagttcccaaaacaggacgtgtttattgctcctggcaag

SEQ ID NO: 1054 - protein, 359 aa, synthetic construct
  REGION 1..359: note = Variant of oxalate decarboxylase from Gemmata sp. SH-PL17
MGDPTFMNNVPDPLLSGKDLPTFKFELEKSKGKVIGGSSGKEATVVQLPISKGIAGVSMVLEPGAMRELHWHATAAEWGFVLWGHVRTTVIDPQGLAETNDFGPGDVWYFPRGHGHMLECLGDKPAHFILIFDNGYFSEFGTFSITDWIGHTPKALLAKNFKLPESAFDGFPKKEVYFARGAVPPATPAAPLQGLKLPPLTHKYELLEQNPHKVFKGGREWRVDSTRFPISKTVTGVVLDLEPGALRELHWHPNADEWQYVIDGNISVTMFGSHGRVRTEQMEKGDVGYIPQGYGHSIENVGDRPCRVLIGFNTGNYQAIDLSQWIAGNPADVLATNFSKPTSLFEKFPKQDVFIAPGK

SEQ ID NO: 1055 - DNA, 1077 bp, synthetic construct
  misc_feature 1..1077: note = Variant of oxalate decarboxylase from Gemmata sp. SH-PL17
  source 1..1077: mol_type = other DNA
atgggtgaccctacctttatgaacaatgtaccagaccctctgctgtcgggcaaagatttgccgacgttcaagtttgcgctggaaaagagcaagggcaaagtcattggggggagttcgggaaaagaagcaaccgttgtccagttacctatctccaaaggcattgctggtgtgagcatggtacttgaaccgggtgcgatgcgcgaattgcactggcatgccacagcagcagagtgggggttcgtattatggggccacgtccgtacgacggtgatcgatccacaaggtctggccgaaaccaacgactttggaccgggcgacgtgtggtattttcctcgcggtcatgggcacatgctggaatgcctgggcgataaaccggcgcatttcattctgatcttcgataacggctacttctcagagtttggcaccttctctattactgactggatcggtcacacaccgaaagcgcttctcgccaagaactttaagctgcccgaaagcgcttttgatgggtttcccaaaaaagaggtctattttgcacgtggcgcggttccaccagccacccctgcagcgcctttacagggactgaagctgccaccactcacgcataaatacgaactcctcgaacaagaacctcataaagtttttaaaggtggtcgtgaatggcgcgtggatagcactcgttttcccatttccaagactgtaaccggcgttgttcttgatttggaacccggcgcgttacgcgagcttcactggcatcctaatgctgacgagtggcaatatgtgatcgatggcaacattagtgtgacgatgttcggttctcatggccgtgtacgcaccgaacagatggagaagggtgatgtcgggtatattccacaggggtatggccacagcatcgaaaatgttggagatcgtccttgtcgcgtcttgattggctttaacacaggtaactaccaagcgatcgacttatcacagtggattgcaggtaatcccgcggatgttcttgccacgaacttctccaaacccaccagcctctttgaaaagttcccaaaacaggacgtgtttattgctcctggcaag

SEQ ID NO: 1056 - protein, 359 aa, synthetic construct
  REGION 1..359: note = Variant of oxalate decarboxylase from Gemmata sp. SH-PL17
MGDPTFMNNVPDPLLSGKDLPTFKFALEKSKGKVIGGSSGKEATVVQLPISKGIAGVSMVLEPGAMRELHWHATAAEWGFVLWGHVRTTVIDPQGLAETNDFGPGDVWYFPRGHGHMLECLGDKPAHFILIFDNGYFSEFGTFSITDWIGHTPKALLAKNFKLPESAFDGFPKKEVYFARGAVPPATPAAPLQGLKLPPLTHKYELLEQEPHKVFKGGREWRVDSTRFPISKTVTGVVLDLEPGALRELHWHPNADEWQYVIDGNISVTMFGSHGRVRTEQMEKGDVGYIPQGYGHSIENVGDRPCRVLIGFNTGNYQAIDLSQWIAGNPADVLATNFSKPTSLFEKFPKQDVFIAPGK

SEQ ID NO: 1057 - DNA, 1077 bp, synthetic construct
  misc_feature 1..1077: note = Variant of oxalate decarboxylase from Gemmata sp. SH-PL17
  source 1..1077: mol_type = other DNA
atgggtgaccctacctttatgaacaatgtaccagaccctctgctgtcgggcaaagatttgccgacgttcaagtttgagctggaaaagagcaagggcaaagtcattggggggagttcgggaaaagaagcaaccgttgtccagttacctatctccaaaggcattgctggtgtgagcatggtacttgaaccgggtgcgatgcgcgaattgcactggcatgccacagcagcagagtgggggttcgtattatggggccacgtccgtacgacggtgatcgatccacaaggtctggccgaaaccaacgactttggaccgggcgacgtgtggtattttcctcgcggtcatgggcacatgctggaatgcctgggcgataaaccggcgcatttcattctgatcttcgataacggctacttctcagagtttggcaccttctctattactgactggatcggtcacacaccgaaagcgcttctcgccaagaactttaagctgcccgaaagcgcttttgatgggtttcccaaaaaagaggtctattttgcacgtggcgcggttccaccagccacccctgcagcgcctttacagggactgaagctgccaccactcacgcataaatacgaactcctcgaacaagaacctcataaagtttttaaaggtggtcgtgaatggcgcgtggatagcactcgttttcccatttccaagactgtaaccggcgttgttcttgatttggaacccggcgcgttacgcgagcttcactggcatcctaatgctgacgagtggcaatatgtgatcgatggcaacattagtgtgacgatgttcggttctcatggccgtcggcgcaccgaacagatggagaagggtgatgtcgggtatattccacaggggtatggccacagcatcgaaaatgttggagatcgtccttgtcgcgtcttgattggctttaacacaggtaactaccaagcgatcgacttatcacagtggattgcaggtaatcccgcggatgttcttgccacgaacttctccaaacccaccagcctctttgaaaagttcccaaaacaggacgtgtttattgctcctggcaag

SEQ ID NO: 1058 - protein, 359 aa, synthetic construct
  REGION 1..359: note = Variant of oxalate decarboxylase from Gemmata sp. SH-PL17
MGDPTFMNNVPDPLLSGKDLPTFKFELEKSKGKVIGGSSGKEATVVQLPISKGIAGVSMVLEPGAMRELHWHATAAEWGFVLWGHVRTTVIDPQGLAETNDFGPGDVWYFPRGHGHMLECLGDKPAHFILIFDNGYFSEFGTFSITDWIGHTPKALLAKNFKLPESAFDGFPKKEVYFARGAVPPATPAAPLQGLKLPPLTHKYELLEQEPHKVFKGGREWRVDSTRFPISKTVTGVVLDLEPGALRELHWHPNADEWQYVIDGNISVTMFGSHGRRRTEQMEKGDVGYIPQGYGHSIENVGDRPCRVLIGFNTGNYQAIDLSQWIAGNPADVLATNFSKPTSLFEKFPKQDVFIAPGK

SEQ ID NO: 1059 - DNA, 1077 bp, synthetic construct
  misc_feature 1..1077: note = Variant of oxalate decarboxylase from Gemmata sp. SH-PL17
  source 1..1077: mol_type = other DNA
atgggtgaccctacctttatgaacaatgtaccagaccctctgctgtcgggcaaagatttgccgacgttcaagtttgagctggaaaagagcaagggcaaagtcattggggggagttcgggaaaagaagcaaccgttgtccagttacctatctccaaaggcattgctggtgtgagcatggtacttgaaccgggtgcgatgcgcgaattgcactggcatgccacagcagcagagtgggggttcgtattatggggccacgtccgtacgacggtgatcgatccacaaggttttgccgaaaccaacgactttggaccgggcgacgtgtggtattttcctcgcggtcatgggcacatgctggaatgcctgggcgataaaccggcgcatttcattctgatcttcgataacggctacttctcagagtttggcaccttctctattactgactggatcggtcacacaccgaaagcgcttctcgccaagaactttaagctgcccgaaagcgcttttgatgggtttcccaaaaaagaggtctattttgcacgtggcgcggttccaccagccacccctgcagcgcctttacagggactgaagctgccaccactcacgcataaatacgaactcctcgaacaagaacctcataaagtttttaaaggtggtcgtgaatggcgcgtggatagcactcgttttcccatttccaagactgtaaccggcgttgttcttgatttggaacccggcgcgttacgcgagcttcactggcatcctaatgctgacgagtggcaatatgtgatcgatggcaacattagtgtgacgatgttcggttctcatggccgtgtacgcaccgaacagatggagaagggtgatgtcgggtatattccacaggggtatggccacagcatcgaaaatgttggagatcgtccttgtcgcgtcttgattggctttaacacaggtaactaccaagcgatcgacttatcacagtggattgcaggtaatcccgcggatgttcttgccacgaacttctccaaacccaccagcctctttgaaaagttcccaaaacaggacgtgtttattgctcctggcaag

SEQ ID NO: 1060 - protein, 359 aa, synthetic construct
  REGION 1..359: note = Variant of oxalate decarboxylase from Gemmata sp. SH-PL17
MGDPTFMNNVPDPLLSGKDLPTFKFELEKSKGKVIGGSSGKEATVVQLPISKGIAGVSMVLEPGAMRELHWHATAAEWGFVLWGHVRTTVIDPQGFAETNDFGPGDVWYFPRGHGHMLECLGDKPAHFILIFDNGYFSEFGTFSITDWIGHTPKALLAKNFKLPESAFDGFPKKEVYFARGAVPPATPAAPLQGLKLPPLTHKYELLEQEPHKVFKGGREWRVDSTRFPISKTVTGVVLDLEPGALRELHWHPNADEWQYVIDGNISVTMFGSHGRVRTEQMEKGDVGYIPQGYGHSIENVGDRPCRVLIGFNTGNYQAIDLSQWIAGNPADVLATNFSKPTSLFEKFPKQDVFIAPGK

SEQ ID NO: 1061 - DNA, 1077 bp, synthetic construct
  misc_feature 1..1077: note = Variant of oxalate decarboxylase from Gemmata sp. SH-PL17
  source 1..1077: mol_type = other DNA
atgggtgaccctacctttatgaacaatgtaccagaccctctgctgtcgggcaaagatttgccgacgttcaagtttgagctggaaaagagcaagggcaaagtcattggggggagttcgggaaaagaagcaaccgttgtccagttacctatctccaaaggcattgctggtgtgagcatggtacttgaaccgggtgcgatgcgcgaattgcactggcatgccacagcagcagagtgggggttcgtattatggggccacgtccgtacgacggtgatcgatccacaaggtctggccgaaaccaacgactttggaccgggcgacgtgtggtattttcctcgcggtcatgggcacatgctggaatgcctgggcgataaaccggcgcatttcattctgatcttcgataacggctacttctcagagtttggcaccttctctattactgactggatcggtcacacaccgaaagcgcttctcgccaagaactttaagctgcccgaaagcgcttttgatgggtttcccaaaggtgaggtctattttgcacgtggcgcggttccaccagccacccctgcagcgcctttacagggactgaagctgccaccactcacgcataaatacgaactcctcgaacaagaacctcataaagtttttaaaggtggtcgtgaatggcgcgtggatagcactcgttttcccatttccaagactgtaaccggcgttgttcttgatttggaacccggcgcgttacgcgagcttcactggcatcctaatgctgacgagtggcaatatgtgatcgatggcaacattagtgtgacgatgttcggttctcatggccgtgtacgcaccgaacagatggagaagggtgatgtcgggtatattccacaggggtatggccacagcatcgaaaatgttggagatcgtccttgtcgcgtcttgattggctttaacacaggtaactaccaagcgatcgacttatcacagtggattgcaggtaatcccgcggatgttcttgccacgaacttctccaaacccaccagcctctttgaaaagttcccaaaacaggacgtgtttattgctcctggcaag

SEQ ID NO: 1062 - protein, 359 aa, synthetic construct
  REGION 1..359: note = Variant of oxalate decarboxylase from Gemmata sp. SH-PL17
MGDPTFMNNVPDPLLSGKDLPTFKFELEKSKGKVIGGSSGKEATVVQLPISKGIAGVSMVLEPGAMRELHWHATAAEWGFVLWGHVRTTVIDPQGLAETNDFGPGDVWYFPRGHGHMLECLGDKPAHFILIFDNGYFSEFGTFSITDWIGHTPKALLAKNFKLPESAFDGFPKGEVYFARGAVPPATPAAPLQGLKLPPLTHKYELLEQEPHKVFKGGREWRVDSTRFPISKTVTGVVLDLEPGALRELHWHPNADEWQYVIDGNISVTMFGSHGRVRTEQMEKGDVGYIPQGYGHSIENVGDRPCRVLIGFNTGNYQAIDLSQWIAGNPADVLATNFSKPTSLFEKFPKQDVFIAPGK

SEQ ID NO: 1063 - DNA, 1077 bp, synthetic construct
  misc_feature 1..1077: note = Variant of oxalate decarboxylase from Gemmata sp. SH-PL17
  source 1..1077: mol_type = other DNA
atgggtgaccctacctttatgaacaatgtaccagaccctctgctgcagggcaaagatttgccgacgttcaagtttgagctggaaaagagcaagggcaaagtcattggggggagttcgggaaaagaagcaaccgttgtccagttacctatctccaaaggcattgctggtgtgagcatggtacttgaaccgggtgcgatgcgcgaattgcactggcatgccacagcagcagagtgggggttcgtattatggggccacgtccgtacgacggtgatcgatccacaaggtctggccgaaaccaacgactttggaccgggcgacgtgtggtattttcctcgcggtcatgggcacatgctggaatgcctgggcgataaaccggcgcatttcattctgatcttcgataacggctacttctcagagtttggcaccttctctattactgactggatcggtcacacaccgaaagcgcttctcgccaagaactttaagctgcccgaaagcgcttttgatgggtttcccaaaaaagaggtctattttgcacgtggcgcggttccaccagccacccctgcagcgcctttacagggactgaagctgccaccactcacgcataaatacgaactcctcgaacaagaacctcataaagtttttaaaggtggtcgtgaatggcgcgtggatagcactcgttttcccatttccaagactgtaaccggcgttgttcttgatttggaacccggcgcgttacgcgagcttcactggcatcctaatgctgacgagtggcaatatgtgatcgatggcaacattagtgtgacgatgttcggttctcatggccgtgtacgcaccgaacagatggagaagggtgatgtcgggtatattccacaggggtatggccacagcatcgaaaatgttggagatcgtccttgtcgcgtcttgattggctttaacacaggtaactaccaagcgatcgacttatcacagtggattgcaggtaatcccgcggatgttcttgccacgaacttctccaaacccaccagcctctttgaaaagttcccaaaacaggacgtgtttattgctcctggcaag

SEQ ID NO: 1064 - protein, 359 aa, synthetic construct
  REGION 1..359: note = Variant of oxalate decarboxylase from Gemmata sp. SH-PL17
MGDPTFMNNVPDPLLQGKDLPTFKFELEKSKGKVIGGSSGKEATVVQLPISKGIAGVSMVLEPGAMRELHWHATAAEWGFVLWGHVRTTVIDPQGLAETNDFGPGDVWYFPRGHGHMLECLGDKPAHFILIFDNGYFSEFGTFSITDWIGHTPKALLAKNFKLPESAFDGFPKKEVYFARGAVPPATPAAPLQGLKLPPLTHKYELLEQEPHKVFKGGREWRVDSTRFPISKTVTGVVLDLEPGALRELHWHPNADEWQYVIDGNISVTMFGSHGRVRTEQMEKGDVGYIPQGYGHSIENVGDRPCRVLIGFNTGNYQAIDLSQWIAGNPADVLATNFSKPTSLFEKFPKQDVFIAPGK

SEQ ID NO: 1065 - DNA, 1077 bp, synthetic construct
  misc_feature 1..1077: note = Variant of oxalate decarboxylase from Gemmata sp. SH-PL17
  source 1..1077: mol_type = other DNA
atgggtgaccctacctttatgaacaatgtaccagaccctctgctgtcgggcaaagatttgccgacgttcaagtttgagctggaaaagagcaagggcaaagtcattggggggagttcgggaaaagaagcaaccgttgtccagttacctatctccaaaggcattgctggtgtgagcatggtacttgaaccgggtgcgatgcgcgaattgcactggcatgccacagcagcagagtgggggttcgtattatggggccacgtccgtacgacggtgatcgatccacaaggtctggccgaaaccaacgactttggaccgggcgacgtgtggtattttcctcgcggtcatgggcacatgctggaatgcctgggcgataaaccggcgcatttcattctgatcttcgataacggctacttctcagagtttggcaccttctctattactgactggatcggtcacacaccgaaagcgcttctcgccaagaactttaagctgcccgaaagcgcttttgatgggtttcccaaaaaagaggtctattttgcacgtggcgcggttccaccagccacccctgcagcgcctttacagggactgaagctgccaccactcacgcataaatacgaactcctcgaacaagaacctcataaagtttttaaaggtggtcgtgaatggcgcgtggatagcactcgttttcccatttccaagactgtaaccggcgttgttcttgatttggaacccggcgcgttacgcgagcttcactggcatcctaatgctgacgagtggcaatatgtgatcgatggcaacattagtgtgacgatgttcggttctcatggccgtgcgcgcaccgaacagatggagaagggtgatgtcgggtatattccacaggggtatggccacagcatcgaaaatgttggagatcgtccttgtcgcgtcttgattggctttaacacaggtaactaccaagcgatcgacttatcacagtggattgcaggtaatcccgcggatgttcttgccacgaacttctccaaacccaccagcctctttgaaaagttcccaaaacaggacgtgtttattgctcctggcaag

SEQ ID NO: 1066 - protein, 359 aa, synthetic construct
  REGION 1..359: note = Variant of oxalate decarboxylase from Gemmata sp. SH-PL17
MGDPTFMNNVPDPLLSGKDLPTFKFELEKSKGKVIGGSSGKEATVVQLPISKGIAGVSMVLEPGAMRELHWHATAAEWGFVLWGHVRTTVIDPQGLAETNDFGPGDVWYFPRGHGHMLECLGDKPAHFILIFDNGYFSEFGTFSITDWIGHTPKALLAKNFKLPESAFDGFPKKEVYFARGAVPPATPAAPLQGLKLPPLTHKYELLEQEPHKVFKGGREWRVDSTRFPISKTVTGVVLDLEPGALRELHWHPNADEWQYVIDGNISVTMFGSHGRARTEQMEKGDVGYIPQGYGHSIENVGDRPCRVLIGFNTGNYQAIDLSQWIAGNPADVLATNFSKPTSLFEKFPKQDVFIAPGK

SEQ ID NO: 1067 - DNA, 1077 bp, synthetic construct
  misc_feature 1..1077: note = Variant of oxalate decarboxylase from Gemmata sp. SH-PL17
  source 1..1077: mol_type = other DNA
atgggtgaccctacctttatgaacaatgtaccagaccagctgctgtcgggcaaagatttgccgacgttcaagtttgagctggaaaagagcaagggcaaagtcattggggggagttcgggaaaagaagcaaccgttgtccagttacctatctccaaaggcattgctggtgtgagcatggtacttgaaccgggtgcgatgcgcgaattgcactggcatgccacagcagcagagtgggggttcgtattatggggccacgtccgtacgacggtgatcgatccacaaggtctggccgaaaccaacgactttggaccgggcgacgtgtggtattttcctcgcggtcatgggcacatgctggaatgcctgggcgataaaccggcgcatttcattctgatcttcgataacggctacttctcagagtttggcaccttctctattactgactggatcggtcacacaccgaaagcgcttctcgccaagaactttaagctgcccgaaagcgcttttgatgggtttcccaaaaaagaggtctattttgcacgtggcgcggttccaccagccacccctgcagcgcctttacagggactgaagctgccaccactcacgcataaatacgaactcctcgaacaagaacctcataaagtttttaaaggtggtcgtgaatggcgcgtggatagcactcgttttcccatttccaagactgtaaccggcgttgttcttgatttggaacccggcgcgttacgcgagcttcactggcatcctaatgctgacgagtggcaatatgtgatcgatggcaacattagtgtgacgatgttcggttctcatggccgtgtacgcaccgaacagatggagaagggtgatgtcgggtatattccacaggggtatggccacagcatcgaaaatgttggagatcgtccttgtcgcgtcttgattggctttaacacaggtaactaccaagcgatcgacttatcacagtggattgcaggtaatcccgcggatgttcttgccacgaacttctccaaacccaccagcctctttgaaaagttcccaaaacaggacgtgtttattgctcctggcaag

SEQ ID NO: 1068 - protein, 359 aa, synthetic construct
  REGION 1..359: note = Variant of oxalate decarboxylase from Gemmata sp. SH-PL17
MGDPTFMNNVPDQLLSGKDLPTFKFELEKSKGKVIGGSSGKEATVVQLPISKGIAGVSMVLEPGAMRELHWHATAAEWGFVLWGHVRTTVIDPQGLAETNDFGPGDVWYFPRGHGHMLECLGDKPAHFILIFDNGYFSEFGTFSITDWIGHTPKALLAKNFKLPESAFDGFPKKEVYFARGAVPPATPAAPLQGLKLPPLTHKYELLEQEPHKVFKGGREWRVDSTRFPISKTVTGVVLDLEPGALRELHWHPNADEWQYVIDGNISVTMFGSHGRVRTEQMEKGDVGYIPQGYGHSIENVGDRPCRVLIGFNTGNYQAIDLSQWIAGNPADVLATNFSKPTSLFEKFPKQDVFIAPGK

SEQ ID NO: 1069 - DNA, 1077 bp, synthetic construct
  misc_feature 1..1077: note = Variant of oxalate decarboxylase from Gemmata sp. SH-PL17
  source 1..1077: mol_type = other DNA
atgggtgaccctacctttatgaacaatgtaccagaccctctgctgtcgggcaaagatttgccgacgttcaagtttgagctggaaaagagcaagggcaaagtcattggggggagttcgggaaaagaagcaaccgttgtccagttacctatctccaaaggcattgctggtgtgagcatggtacttgaaccgggtgcgatgcgcgaattgcactggcatgccacagcagcagagtggtttttcgtattatggggccacgtccgtacgacggtgatcgatccacaaggtctggccgaaaccaacgactttggaccgggcgacgtgtggtattttcctcgcggtcatgggcacatgctggaatgcctgggcgataaaccggcgcatttcattctgatcttcgataacggctacttctcagagtttggcaccttctctattactgactggatcggtcacacaccgaaagcgcttctcgccaagaactttaagctgcccgaaagcgcttttgatgggtttcccaaaaaagaggtctattttgcacgtggcgcggttccaccagccacccctgcagcgcctttacagggactgaagctgccaccactcacgcataaatacgaactcctcgaacaagaacctcataaagtttttaaaggtggtcgtgaatggcgcgtggatagcactcgttttcccatttccaagactgtaaccggcgttgttcttgatttggaacccggcgcgttacgcgagcttcactggcatcctaatgctgacgagtggcaatatgtgatcgatggcaacattagtgtgacgatgttcggttctcatggccgtgtacgcaccgaacagatggagaagggtgatgtcgggtatattccacaggggtatggccacagcatcgaaaatgttggagatcgtccttgtcgcgtcttgattggctttaacacaggtaactaccaagcgatcgacttatcacagtggattgcaggtaatcccgcggatgttcttgccacgaacttctccaaacccaccagcctctttgaaaagttcccaaaacaggacgtgtttattgctcctggcaag

SEQ ID NO: 1070 - protein, 359 aa, synthetic construct
  REGION 1..359: note = Variant of oxalate decarboxylase from Gemmata sp. SH-PL17
MGDPTFMNNVPDPLLSGKDLPTFKFELEKSKGKVIGGSSGKEATVVQLPISKGIAGVSMVLEPGAMRELHWHATAAEWFFVLWGHVRTTVIDPQGLAETNDFGPGDVWYFPRGHGHMLECLGDKPAHFILIFDNGYFSEFGTFSITDWIGHTPKALLAKNFKLPESAFDGFPKKEVYFARGAVPPATPAAPLQGLKLPPLTHKYELLEQEPHKVFKGGREWRVDSTRFPISKTVTGVVLDLEPGALRELHWHPNADEWQYVIDGNISVTMFGSHGRVRTEQMEKGDVGYIPQGYGHSIENVGDRPCRVLIGFNTGNYQAIDLSQWIAGNPADVLATNFSKPTSLFEKFPKQDVFIAPGK

SEQ ID NO: 1071 - DNA, 1077 bp, synthetic construct
  misc_feature 1..1077: note = Variant of oxalate decarboxylase from Gemmata sp. SH-PL17
  source 1..1077: mol_type = other DNA
atgggtgaccctacctttatgaacaatgtaccagaccctctgctgctgggcaaagatttgccgacgttcaagtttgagctggaaaagagcaagggcaaagtcattggggggagttcgggaaaagaagcaaccgttgtccagttacctatctccaaaggcattgctggtgtgagcatggtacttgaaccgggtgcgatgcgcgaattgcactggcatgccacagcagcagagtgggggttcgtattatggggccacgtccgtacgacggtgatcgatccacaaggtctggccgaaaccaacgactttggaccgggcgacgtgtggtattttcctcgcggtcatgggcacatgctggaatgcctgggcgataaaccggcgcatttcattctgatcttcgataacggctacttctcagagtttggcaccttctctattactgactggatcggtcacacaccgaaagcgcttctcgccaagaactttaagctgcccgaaagcgcttttgatgggtttcccaaaaaagaggtctattttgcacgtggcgcggttccaccagccacccctgcagcgcctttacagggactgaagctgccaccactcacgcataaatacgaactcctcgaacaagaacctcataaagtttttaaaggtggtcgtgaatggcgcgtggatagcactcgttttcccatttccaagactgtaaccggcgttgttcttgatttggaacccggcgcgttacgcgagcttcactggcatcctaatgctgacgagtggcaatatgtgatcgatggcaacattagtgtgacgatgttcggttctcatggccgtgtacgcaccgaacagatggagaagggtgatgtcgggtatattccacaggggtatggccacagcatcgaaaatgttggagatcgtccttgtcgcgtcttgattggctttaacacaggtaactaccaagcgatcgacttatcacagtggattgcaggtaatcccgcggatgttcttgccacgaacttctccaaacccaccagcctctttgaaaagttcccaaaacaggacgtgtttattgctcctggcaag

SEQ ID NO: 1072 - protein, 359 aa, synthetic construct
  REGION 1..359: note = Variant of oxalate decarboxylase from Gemmata sp. SH-PL17
MGDPTFMNNVPDPLLLGKDLPTFKFELEKSKGKVIGGSSGKEATVVQLPISKGIAGVSMVLEPGAMRELHWHATAAEWGFVLWGHVRTTVIDPQGLAETNDFGPGDVWYFPRGHGHMLECLGDKPAHFILIFDNGYFSEFGTFSITDWIGHTPKALLAKNFKLPESAFDGFPKKEVYFARGAVPPATPAAPLQGLKLPPLTHKYELLEQEPHKVFKGGREWRVDSTRFPISKTVTGVVLDLEPGALRELHWHPNADEWQYVIDGNISVTMFGSHGRVRTEQMEKGDVGYIPQGYGHSIENVGDRPCRVLIGFNTGNYQAIDLSQWIAGNPADVLATNFSKPTSLFEKFPKQDVFIAPGK

SEQ ID NO: 1073 - DNA, 1077 bp, synthetic construct
  misc_feature 1..1077: note = Variant of oxalate decarboxylase from Gemmata sp. SH-PL17
  source 1..1077: mol_type = other DNA
atgggtgaccctacctttatgaacaatgtaccagaccctctgctgtcgggcaaagatttgccgacgttcaagtttgagctggaaaagagcaagggcaaagtcattggggggagttcgggaaaagaagcaaccgttgtccagttacctatctccaaaggcattgctggtgtgagcatggtacttgaaccgggtgcgatgcgcgaattgcactggcatgccacagcagcagagtgggggttcgtattatggggccacgtccgtacgacggtgatcgatccacaaggtctggccgaaaccaacgactttggaccgggcgacgtgtggtattttcctcgcggtcatgggcacatgctggaatgcctgggcgataaaccggcgcatttcattctgatcttcgataacggctacttctcagagtttggcaccttctctattactgactggatcggtcacacaccgaaagcgcttctcgccaagaactttaagctgcccgaaagcgcttttgatgggtttcccaaaaaagaggtctattttgcacgtggcgcggttccaccagccacccctgcagcgcctttacagggaaataagctgccaccactcacgcataaatacgaactcctcgaacaagaacctcataaagtttttaaaggtggtcgtgaatggcgcgtggatagcactcgttttcccatttccaagactgtaaccggcgttgttcttgatttggaacccggcgcgttacgcgagcttcactggcatcctaatgctgacgagtggcaatatgtgatcgatggcaacattagtgtgacgatgttcggttctcatggccgtgtacgcaccgaacagatggagaagggtgatgtcgggtatattccacaggggtatggccacagcatcgaaaatgttggagatcgtccttgtcgcgtcttgattggctttaacacaggtaactaccaagcgatcgacttatcacagtggattgcaggtaatcccgcggatgttcttgccacgaacttctccaaacccaccagcctctttgaaaagttcccaaaacaggacgtgtttattgctcctggcaag

SEQ ID NO: 1074 - protein, 359 aa, synthetic construct
  REGION 1..359: note = Variant of oxalate decarboxylase from Gemmata sp. SH-PL17
MGDPTFMNNVPDPLLSGKDLPTFKFELEKSKGKVIGGSSGKEATVVQLPISKGIAGVSMVLEPGAMRELHWHATAAEWGFVLWGHVRTTVIDPQGLAETNDFGPGDVWYFPRGHGHMLECLGDKPAHFILIFDNGYFSEFGTFSITDWIGHTPKALLAKNFKLPESAFDGFPKKEVYFARGAVPPATPAAPLQGNKLPPLTHKYELLEQEPHKVFKGGREWRVDSTRFPISKTVTGVVLDLEPGALRELHWHPNADEWQYVIDGNISVTMFGSHGRVRTEQMEKGDVGYIPQGYGHSIENVGDRPCRVLIGFNTGNYQAIDLSQWIAGNPADVLATNFSKPTSLFEKFPKQDVFIAPGK

SEQ ID NO: 1075 - DNA, 1077 bp, synthetic construct
  misc_feature 1..1077: note = Variant of oxalate decarboxylase from Gemmata sp. SH-PL17
  source 1..1077: mol_type = other DNA
atgggtgaccctacctttatgaacaatgtaccagaccctctgctgtcgggcaaagatttgccgacgttcaagtttgagctggaaaagagcaagggcaaagtcattggggggagttcgggaaaagaagcaaccgttgtccagttacctatctccaaaggcattgctggtgtgagcatggtacttgaaccgggtgcgatgcgcgaattgcactggcatgccacagcagcagagtgggtgttcgtattatggggccacgtccgtacgacggtgatcgatccacaaggtctggccgaaaccaacgactttggaccgggcgacgtgtggtattttcctcgcggtcatgggcacatgctggaatgcctgggcgataaaccggcgcatttcattctgatcttcgataacggctacttctcagagtttggcaccttctctattactgactggatcggtcacacaccgaaagcgcttctcgccaagaactttaagctgcccgaaagcgcttttgatgggtttcccaaaaaagaggtctattttgcacgtggcgcggttccaccagccacccctgcagcgcctttacagggactgaagctgccaccactcacgcataaatacgaactcctcgaacaagaacctcataaagtttttaaaggtggtcgtgaatggcgcgtggatagcactcgttttcccatttccaagactgtaaccggcgttgttcttgatttggaacccggcgcgttacgcgagcttcactggcatcctaatgctgacgagtggcaatatgtgatcgatggcaacattagtgtgacgatgttcggttctcatggccgtgtacgcaccgaacagatggagaagggtgatgtcgggtatattccacaggggtatggccacagcatcgaaaatgttggagatcgtccttgtcgcgtcttgattggctttaacacaggtaactaccaagcgatcgacttatcacagtggattgcaggtaatcccgcggatgttcttgccacgaacttctccaaacccaccagcctctttgaaaagttcccaaaacaggacgtgtttattgctcctggcaag

SEQ ID NO: 1076 - protein, 359 aa, synthetic construct
  REGION 1..359: note = Variant of oxalate decarboxylase from Gemmata sp. SH-PL17
MGDPTFMNNVPDPLLSGKDLPTFKFELEKSKGKVIGGSSGKEATVVQLPISKGIAGVSMVLEPGAMRELHWHATAAEWVFVLWGHVRTTVIDPQGLAETNDFGPGDVWYFPRGHGHMLECLGDKPAHFILIFDNGYFSEFGTFSITDWIGHTPKALLAKNFKLPESAFDGFPKKEVYFARGAVPPATPAAPLQGLKLPPLTHKYELLEQEPHKVFKGGREWRVDSTRFPISKTVTGVVLDLEPGALRELHWHPNADEWQYVIDGNISVTMFGSHGRVRTEQMEKGDVGYIPQGYGHSIENVGDRPCRVLIGFNTGNYQAIDLSQWIAGNPADVLATNFSKPTSLFEKFPKQDVFIAPGK

SEQ ID NO: 1077 - DNA, 1077 bp, synthetic construct
  misc_feature 1..1077: note = Variant of oxalate decarboxylase from Gemmata sp. SH-PL17
  source 1..1077: mol_type = other DNA
atgggtgaccctacctttatgaacaatgtaccagaccctctgctgtcgcctaaagatttgccgacgttcaagtttgagctggaaaagagcaagggcaaagtcattggggggagttcgggaaaagaagcaaccgttgtccagttacctatctccaaaggcattgctggtgtgagcatggtacttgaaccgggtgcgatgcgcgaattgcactggcatgccacagcagcagagtgggggttcgtattatggggccacgtccgtacgacggtgatcgatccacaaggtctggccgaaaccaacgactttggaccgggcgacgtgtggtattttcctcgcggtcatgggcacatgctggaatgcctgggcgataaaccggcgcatttcattctgatcttcgataacggctacttctcagagtttggcaccttctctattactgactggatcggtcacacaccgaaagcgcttctcgccaagaactttaagctgcccgaaagcgcttttgatgggtttcccaaaaaagaggtctattttgcacgtggcgcggttccaccagccacccctgcagcgcctttacagggactgaagctgccaccactcacgcataaatacgaactcctcgaacaagaacctcataaagtttttaaaggtggtcgtgaatggcgcgtggatagcactcgttttcccatttccaagactgtaaccggcgttgttcttgatttggaacccggcgcgttacgcgagcttcactggcatcctaatgctgacgagtggcaatatgtgatcgatggcaacattagtgtgacgatgttcggttctcatggccgtgtacgcaccgaacagatggagaagggtgatgtcgggtatattccacaggggtatggccacagcatcgaaaatgttggagatcgtccttgtcgcgtcttgattggctttaacacaggtaactaccaagcgatcgacttatcacagtggattgcaggtaatcccgcggatgttcttgccacgaacttctccaaacccaccagcctctttgaaaagttcccaaaacaggacgtgtttattgctcctggcaag

SEQ ID NO: 1078 - protein, 359 aa, synthetic construct
  REGION 1..359: note = Variant of oxalate decarboxylase from Gemmata sp. SH-PL17
MGDPTFMNNVPDPLLSPKDLPTFKFELEKSKGKVIGGSSGKEATVVQLPISKGIAGVSMVLEPGAMRELHWHATAAEWGFVLWGHVRTTVIDPQGLAETNDFGPGDVWYFPRGHGHMLECLGDKPAHFILIFDNGYFSEFGTFSITDWIGHTPKALLAKNFKLPESAFDGFPKKEVYFARGAVPPATPAAPLQGLKLPPLTHKYELLEQEPHKVFKGGREWRVDSTRFPISKTVTGVVLDLEPGALRELHWHPNADEWQYVIDGNISVTMFGSHGRVRTEQMEKGDVGYIPQGYGHSIENVGDRPCRVLIGFNTGNYQAIDLSQWIAGNPADVLATNFSKPTSLFEKFPKQDVFIAPGK

SEQ ID NO: 1079 - DNA, 1077 bp, synthetic construct
  misc_feature 1..1077: note = Variant of oxalate decarboxylase from Gemmata sp. SH-PL17
  source 1..1077: mol_type = other DNA
atgggtgaccctacctttatgaacaatgtaccagaccctctgctgtcgggcaaagatttgccgacgttcaagtttgagctggaaaagagcaagggcaaagtcattggggggagttcgggaaaagaagcaaccgttgtccagttacctatctccaaaggcattgctggtgtgagcatgcctcttgaaccgggtgcgatgcgcgaattgcactggcatgccacagcagcagagtgggggttcgtattatggggccacgtccgtacgacggtgatcgatccacaaggtctggccgaaaccaacgactttggaccgggcgacgtgtggtattttcctcgcggtcatgggcacatgctggaatgcctgggcgataaaccggcgcatttcattctgatcttcgataacggctacttctcagagtttggcaccttctctattactgactggatcggtcacacaccgaaagcgcttctcgccaagaactttaagctgcccgaaagcgcttttgatgggtttcccaaaaaagaggtctattttgcacgtggcgcggttccaccagccacccctgcagcgcctttacagggactgaagctgccaccactcacgcataaatacgaactcctcgaacaagaacctcataaagtttttaaaggtggtcgtgaatggcgcgtggatagcactcgttttcccatttccaagactgtaaccggcgttgttcttgatttggaacccggcgcgttacgcgagcttcactggcatcctaatgctgacgagtggcaatatgtgatcgatggcaacattagtgtgacgatgttcggttctcatggccgtgtacgcaccgaacagatggagaagggtgatgtcgggtatattccacaggggtatggccacagcatcgaaaatgttggagatcgtccttgtcgcgtcttgattggctttaacacaggtaactaccaagcgatcgacttatcacagtggattgcaggtaatcccgcggatgttcttgccacgaacttctccaaacccaccagcctctttgaaaagttcccaaaacaggacgtgtttattgctcctggcaag

SEQ ID NO: 1080 - protein, 359 aa, synthetic construct
  REGION 1..359: note = Variant of oxalate decarboxylase from Gemmata sp. SH-PL17
MGDPTFMNNVPDPLLSGKDLPTFKFELEKSKGKVIGGSSGKEATVVQLPISKGIAGVSMPLEPGAMRELHWHATAAEWGFVLWGHVRTTVIDPQGLAETNDFGPGDVWYFPRGHGHMLECLGDKPAHFILIFDNGYFSEFGTFSITDWIGHTPKALLAKNFKLPESAFDGFPKKEVYFARGAVPPATPAAPLQGLKLPPLTHKYELLEQEPHKVFKGGREWRVDSTRFPISKTVTGVVLDLEPGALRELHWHPNADEWQYVIDGNISVTMFGSHGRVRTEQMEKGDVGYIPQGYGHSIENVGDRPCRVLIGFNTGNYQAIDLSQWIAGNPADVLATNFSKPTSLFEKFPKQDVFIAPGK

SEQ ID NO: 1081 - DNA, 1077 bp, synthetic construct
  misc_feature 1..1077: note = Variant of oxalate decarboxylase from Gemmata sp. SH-PL17
  source 1..1077: mol_type = other DNA
atgggtgaccctacctttatgaacaatgtaccagaccctctgctgtcgggcaaagatttgccgacgttcaagtttgagctggaaaagagcaagggcaaagtcattgggccgagttcgggaaaagaagcaaccgttgtccagttacctatctccaaaggcattgctggtgtgagcatggtacttgaaccgggtgcgatgcgcgaattgcactggcatgccacagcagcagagtgggggttcgtattatggggccacgtccgtacgacggtgatcgatccacaaggtctggccgaaaccaacgactttggaccgggcgacgtgtggtattttcctcgcggtcatgggcacatgctggaatgcctgggcgataaaccggcgcatttcattctgatcttcgataacggctacttctcagagtttggcaccttctctattactgactggatcggtcacacaccgaaagcgcttctcgccaagaactttaagctgcccgaaagcgcttttgatgggtttcccaaaaaagaggtctattttgcacgtggcgcggttccaccagccacccctgcagcgcctttacagggactgaagctgccaccactcacgcataaatacgaactcctcgaacaagaacctcataaagtttttaaaggtggtcgtgaatggcgcgtggatagcactcgttttcccatttccaagactgtaaccggcgttgttcttgatttggaacccggcgcgttacgcgagcttcactggcatcctaatgctgacgagtggcaatatgtgatcgatggcaacattagtgtgacgatgttcggttctcatggccgtgtacgcaccgaacagatggagaagggtgatgtcgggtatattccacaggggtatggccacagcatcgaaaatgttggagatcgtccttgtcgcgtcttgattggctttaacacaggtaactaccaagcgatcgacttatcacagtggattgcaggtaatcccgcggatgttcttgccacgaacttctccaaacccaccagcctctttgaaaagttcccaaaacaggacgtgtttattgctcctggcaag

SEQ ID NO: 1082 - protein, 359 aa, synthetic construct
  REGION 1..359: note = Variant of oxalate decarboxylase from Gemmata sp. SH-PL17
MGDPTFMNNVPDPLLSGKDLPTFKFELEKSKGKVIGPSSGKEATVVQLPISKGIAGVSMVLEPGAMRELHWHATAAEWGFVLWGHVRTTVIDPQGLAETNDFGPGDVWYFPRGHGHMLECLGDKPAHFILIFDNGYFSEFGTFSITDWIGHTPKALLAKNFKLPESAFDGFPKKEVYFARGAVPPATPAAPLQGLKLPPLTHKYELLEQEPHKVFKGGREWRVDSTRFPISKTVTGVVLDLEPGALRELHWHPNADEWQYVIDGNISVTMFGSHGRVRTEQMEKGDVGYIPQGYGHSIENVGDRPCRVLIGFNTGNYQAIDLSQWIAGNPADVLATNFSKPTSLFEKFPKQDVFIAPGK

SEQ ID NO: 1083 - DNA, 1077 bp, synthetic construct
  misc_feature 1..1077: note = Variant of oxalate decarboxylase from Gemmata sp. SH-PL17
  source 1..1077: mol_type = other DNA
atgggtgaccctacctttatgaacaatgtaccagaccctctgctgtcgggcaaagatttgccgacgttcaagtttgagctggaaaagagcaagggcaaagtcattggggggagttcgggaaaagaagcaaccgttgtccagttacctatctccaaaggcattgctggtgtgagcatggtacttgaaccgggtgcgatgcgcgaattgcactggcatgccacagcagcagagtgggggttcgtattatggggccacgtccgtacgacggtgatcgatccacaaggttgggccgaaaccaacgactttggaccgggcgacgtgtggtattttcctcgcggtcatgggcacatgctggaatgcctgggcgataaaccggcgcatttcattctgatcttcgataacggctacttctcagagtttggcaccttctctattactgactggatcggtcacacaccgaaagcgcttctcgccaagaactttaagctgcccgaaagcgcttttgatgggtttcccaaaaaagaggtctattttgcacgtggcgcggttccaccagccacccctgcagcgcctttacagggactgaagctgccaccactcacgcataaatacgaactcctcgaacaagaacctcataaagtttttaaaggtggtcgtgaatggcgcgtggatagcactcgttttcccatttccaagactgtaaccggcgttgttcttgatttggaacccggcgcgttacgcgagcttcactggcatcctaatgctgacgagtggcaatatgtgatcgatggcaacattagtgtgacgatgttcggttctcatggccgtgtacgcaccgaacagatggagaagggtgatgtcgggtatattccacaggggtatggccacagcatcgaaaatgttggagatcgtccttgtcgcgtcttgattggctttaacacaggtaactaccaagcgatcgacttatcacagtggattgcaggtaatcccgcggatgttcttgccacgaacttctccaaacccaccagcctctttgaaaagttcccaaaacaggacgtgtttattgctcctggcaag

SEQ ID NO: 1084 - protein, 359 aa, synthetic construct
  REGION 1..359: note = Variant of oxalate decarboxylase from Gemmata sp. SH-PL17
MGDPTFMNNVPDPLLSGKDLPTFKFELEKSKGKVIGGSSGKEATVVQLPISKGIAGVSMVLEPGAMRELHWHATAAEWGFVLWGHVRTTVIDPQGWAETNDFGPGDVWYFPRGHGHMLECLGDKPAHFILIFDNGYFSEFGTFSITDWIGHTPKALLAKNFKLPESAFDGFPKKEVYFARGAVPPATPAAPLQGLKLPPLTHKYELLEQEPHKVFKGGREWRVDSTRFPISKTVTGVVLDLEPGALRELHWHPNADEWQYVIDGNISVTMFGSHGRVRTEQMEKGDVGYIPQGYGHSIENVGDRPCRVLIGFNTGNYQAIDLSQWIAGNPADVLATNFSKPTSLFEKFPKQDVFIAPGK

SEQ ID NO: 1085 - DNA, 1077 bp, synthetic construct
  misc_feature 1..1077: note = Variant of oxalate decarboxylase from Gemmata sp. SH-PL17
  source 1..1077: mol_type = other DNA
atgggtgaccctacctttatgaacaatgtaccagaccctctgctgtcgggcaaagatttgccgacgttcaagtttgagctggaaaagagcaagggcaaagtcattggggggagttcgggaaaagaagcaaccgttgtccagttacctatctccaaaggcattgctggtgtgagcatggtacttgaaccgggtgcgatgcgcgaattgcactggcatgccacagcagcagagtgggggttcgtattatggggccacgtccgtacgacggtgatcgatccacaaggtctggccgaaaccaacgactttggaccgggcgacgtgtggtattttcctcgcggtcatgggcacatgctggaatgcctgggcgataaaccggcgcatttcattctgatcttcgataacggctacttctcagagtttggcaccttctctattactgactggatcggtcacacaccgaaagcgcttctcgccaagaactttacgctgcccgaaagcgcttttgatgggtttcccaaaaaagaggtctattttgcacgtggcgcggttccaccagccacccctgcagcgcctttacagggactgaagctgccaccactcacgcataaatacgaactcctcgaacaagaacctcataaagtttttaaaggtggtcgtgaatggcgcgtggatagcactcgttttcccatttccaagactgtaaccggcgttgttcttgatttggaacccggcgcgttacgcgagcttcactggcatcctaatgctgacgagtggcaatatgtgatcgatggcaacattagtgtgacgatgttcggttctcatggccgtgtacgcaccgaacagatggagaagggtgatgtcgggtatattccacaggggtatggccacagcatcgaaaatgttggagatcgtccttgtcgcgtcttgattggctttaacacaggtaactaccaagcgatcgacttatcacagtggattgcaggtaatcccgcggatgttcttgccacgaacttctccaaacccaccagcctctttgaaaagttcccaaaacaggacgtgtttattgctcctggcaag

SEQ ID NO: 1086 - protein, 359 aa, synthetic construct
  REGION 1..359: note = Variant of oxalate decarboxylase from Gemmata sp. SH-PL17
MGDPTFMNNVPDPLLSGKDLPTFKFELEKSKGKVIGGSSGKEATVVQLPISKGIAGVSMVLEPGAMRELHWHATAAEWGFVLWGHVRTTVIDPQGLAETNDFGPGDVWYFPRGHGHMLECLGDKPAHFILIFDNGYFSEFGTFSITDWIGHTPKALLAKNFTLPESAFDGFPKKEVYFARGAVPPATPAAPLQGLKLPPLTHKYELLEQEPHKVFKGGREWRVDSTRFPISKTVTGVVLDLEPGALRELHWHPNADEWQYVIDGNISVTMFGSHGRVRTEQMEKGDVGYIPQGYGHSIENVGDRPCRVLIGFNTGNYQAIDLSQWIAGNPADVLATNFSKPTSLFEKFPKQDVFIAPGK

SEQ ID NO: 1087 - DNA, 1077 bp, synthetic construct
  misc_feature 1..1077: note = Variant of oxalate decarboxylase from Gemmata sp. SH-PL17
  source 1..1077: mol_type = other DNA
atgggtgaccctacctttatgaacaatgtaccagaccctctgctgtcgggcaaagatttgccgacgttcaagtttgagctggaaaagagcaagggcaaagtcattggggggagttcgggaaaagaagcaaccgttgtccagttacctatctccaaaggcattgctggtgtgagcatggtacttgaaccgggtgcgatgcgcgaattgcactggcatgccacagcagcagagtgggggttcgtattatggggccacgtccgtacgacggtgatcgatccacaaggtctggccgaaaccaacgactttggaccgggcgacgtgtggtattttcctcgcggtcatgggcacatgctggaatgcctgggcgataaaccggcgcatttcattctgatcttcgataacggctacttctcagagtttggcaccttctctattactgactggatcggtcacacaccgaaagcgcttctcgccaagaactttaagctgcccgaaagcgcttttgatgggtttcccaaaaaagaggtctattttgcacgtggcgcggttccaccagccacccctgcagcgcctttacagggaatgaagctgccaccactcacgcataaatacgaactcctcgaacaagaacctcataaagtttttaaaggtggtcgtgaatggcgcgtggatagcactcgttttcccatttccaagactgtaaccggcgttgttcttgatttggaacccggcgcgttacgcgagcttcactggcatcctaatgctgacgagtggcaatatgtgatcgatggcaacattagtgtgacgatgttcggttctcatggccgtgtacgcaccgaacagatggagaagggtgatgtcgggtatattccacaggggtatggccacagcatcgaaaatgttggagatcgtccttgtcgcgtcttgattggctttaacacaggtaactaccaagcgatcgacttatcacagtggattgcaggtaatcccgcggatgttcttgccacgaacttctccaaacccaccagcctctttgaaaagttcccaaaacaggacgtgtttattgctcctggcaag

SEQ ID NO: 1088 - protein, 359 aa, synthetic construct
  REGION 1..359: note = Variant of oxalate decarboxylase from Gemmata sp. SH-PL17
MGDPTFMNNVPDPLLSGKDLPTFKFELEKSKGKVIGGSSGKEATVVQLPISKGIAGVSMVLEPGAMRELHWHATAAEWGFVLWGHVRTTVIDPQGLAETNDFGPGDVWYFPRGHGHMLECLGDKPAHFILIFDNGYFSEFGTFSITDWIGHTPKALLAKNFKLPESAFDGFPKKEVYFARGAVPPATPAAPLQGMKLPPLTHKYELLEQEPHKVFKGGREWRVDSTRFPISKTVTGVVLDLEPGALRELHWHPNADEWQYVIDGNISVTMFGSHGRVRTEQMEKGDVGYIPQGYGHSIENVGDRPCRVLIGFNTGNYQAIDLSQWIAGNPADVLATNFSKPTSLFEKFPKQDVFIAPGK

SEQ ID NO: 1089 - DNA, 1077 bp, synthetic construct
  misc_feature 1..1077: note = Variant of oxalate decarboxylase from Gemmata sp. SH-PL17
  source 1..1077: mol_type = other DNA
atgggtgaccctacctttatgaacaatgtaccagaccctctgctgtcgggcaaagatttgccgacgttcaagtttgagctggaaaagagcaagggcaaagtcattggggggagttcgggaaaagaagcaaccgttgtccagttacctatctccaaaggcattgctggtgtgagcatggtacttgaaccgggtgcgatgcgcgaattgcactggcatgccacagcagcagagtgggggttcgtattatggggccacgtccgtacgacggtgatcgatccacaaggtctggccgaaaccaacgactttggaccgggcgacgtgtggtattttcctcgcggtcatgggcacatgctggaatgcctgggcgataaaccggcgcatttcattctgatcttcgataacggctacttctcagagtttggcaccttctctattactgactggatcggtcacacaccgaaagcgcttctcgccaagaactttaagctgcccgaaagcgcttttgatgggtttcccaaaaaagaggtctattttgcacgtggcgcggttccaccagccacccctgcagcgcctttacagggactgaagctgccaccactcacgcataaatacgaactcctcgaacaagaacctcataaagtttttaaaggtggtcgtgaatggcgcgtggatagcactcgttttcccatttccaagactgtaaccggcgttgttcttgatttggaacccggcgcgttacgcgagcttcactggcatcctaatgctgacgagtggcaatatgtgatcgatggcaacattagtgtgacgatgttcggttctcatggccgtgtacgcaccgaacagatggagaagggtgatgtcgggtatattccacaggggtatggccacagcatcgaaaatgttggagatcgtccttgtcgcgtcttgattggctttaacacaggtaactactgggcgatcgacttatcacagtggattgcaggtaatcccgcggatgttcttgccacgaacttctccaaacccaccagcctctttgaaaagttcccaaaacaggacgtgtttattgctcctggcaag

SEQ ID NO: 1090 - protein, 359 aa, synthetic construct
  REGION 1..359: note = Variant of oxalate decarboxylase from Gemmata sp. SH-PL17
MGDPTFMNNVPDPLLSGKDLPTFKFELEKSKGKVIGGSSGKEATVVQLPISKGIAGVSMVLEPGAMRELHWHATAAEWGFVLWGHVRTTVIDPQGLAETNDFGPGDVWYFPRGHGHMLECLGDKPAHFILIFDNGYFSEFGTFSITDWIGHTPKALLAKNFKLPESAFDGFPKKEVYFARGAVPPATPAAPLQGLKLPPLTHKYELLEQEPHKVFKGGREWRVDSTRFPISKTVTGVVLDLEPGALRELHWHPNADEWQYVIDGNISVTMFGSHGRVRTEQMEKGDVGYIPQGYGHSIENVGDRPCRVLIGFNTGNYWAIDLSQWIAGNPADVLATNFSKPTSLFEKFPKQDVFIAPGK

SEQ ID NO: 1091 - DNA, 1077 bp, synthetic construct
  misc_feature 1..1077: note = Variant of oxalate decarboxylase from Gemmata sp. SH-PL17
  source 1..1077: mol_type = other DNA
atgggtgaccctacctttatgaacaatgtaccagaccctctgctgtcgggcaaagatttgccgacgttcaagtttgagctggaaaagagcaagggcaaagtcattgggcggagttcgggaaaagaagcaaccgttgtccagttacctatctccaaaggcattgctggtgtgagcatggtacttgaaccgggtgcgatgcgcgaattgcactggcatgccacagcagcagagtgggggttcgtattatggggccacgtccgtacgacggtgatcgatccacaaggtctggccgaaaccaacgactttggaccgggcgacgtgtggtattttcctcgcggtcatgggcacatgctggaatgcctgggcgataaaccggcgcatttcattctgatcttcgataacggctacttctcagagtttggcaccttctctattactgactggatcggtcacacaccgaaagcgcttctcgccaagaactttaagctgcccgaaagcgcttttgatgggtttcccaaaaaagaggtctattttgcacgtggcgcggttccaccagccacccctgcagcgcctttacagggactgaagctgccaccactcacgcataaatacgaactcctcgaacaagaacctcataaagtttttaaaggtggtcgtgaatggcgcgtggatagcactcgttttcccatttccaagactgtaaccggcgttgttcttgatttggaacccggcgcgttacgcgagcttcactggcatcctaatgctgacgagtggcaatatgtgatcgatggcaacattagtgtgacgatgttcggttctcatggccgtgtacgcaccgaacagatggagaagggtgatgtcgggtatattccacaggggtatggccacagcatcgaaaatgttggagatcgtccttgtcgcgtcttgattggctttaacacaggtaactaccaagcgatcgacttatcacagtggattgcaggtaatcccgcggatgttcttgccacgaacttctccaaacccaccagcctctttgaaaagttcccaaaacaggacgtgtttattgctcctggcaag

SEQ ID NO: 1092 - protein, 359 aa, synthetic construct
  REGION 1..359: note = Variant of oxalate decarboxylase from Gemmata sp. SH-PL17
MGDPTFMNNVPDPLLSGKDLPTFKFELEKSKGKVIGRSSGKEATVVQLPISKGIAGVSMVLEPGAMRELHWHATAAEWGFVLWGHVRTTVIDPQGLAETNDFGPGDVWYFPRGHGHMLECLGDKPAHFILIFDNGYFSEFGTFSITDWIGHTPKALLAKNFKLPESAFDGFPKKEVYFARGAVPPATPAAPLQGLKLPPLTHKYELLEQEPHKVFKGGREWRVDSTRFPISKTVTGVVLDLEPGALRELHWHPNADEWQYVIDGNISVTMFGSHGRVRTEQMEKGDVGYIPQGYGHSIENVGDRPCRVLIGFNTGNYQAIDLSQWIAGNPADVLATNFSKPTSLFEKFPKQDVFIAPGK

SEQ ID NO: 1093 - DNA, 1077 bp, synthetic construct
  misc_feature 1..1077: note = Variant of oxalate decarboxylase from Gemmata sp. SH-PL17
  source 1..1077: mol_type = other DNA
atgggtgaccctacctttatgaacaatgtaccagaccctctgctgactggcaaagatttgccgacgttcaagtttgagctggaaaagagcaagggcaaagtcattggggggagttcgggaaaagaagcaaccgttgtccagttacctatctccaaaggcattgctggtgtgagcatggtacttgaaccgggtgcgatgcgcgaattgcactggcatgccacagcagcagagtgggggttcgtattatggggccacgtccgtacgacggtgatcgatccacaaggtctggccgaaaccaacgactttggaccgggcgacgtgtggtattttcctcgcggtcatgggcacatgctggaatgcctgggcgataaaccggcgcatttcattctgatcttcgataacggctacttctcagagtttggcaccttctctattactgactggatcggtcacacaccgaaagcgcttctcgccaagaactttaagctgcccgaaagcgcttttgatgggtttcccaaaaaagaggtctattttgcacgtggcgcggttccaccagccacccctgcagcgcctttacagggactgaagctgccaccactcacgcataaatacgaactcctcgaacaagaacctcataaagtttttaaaggtggtcgtgaatggcgcgtggatagcactcgttttcccatttccaagactgtaaccggcgttgttcttgatttggaacccggcgcgttacgcgagcttcactggcatcctaatgctgacgagtggcaatatgtgatcgatggcaacattagtgtgacgatgttcggttctcatggccgtgtacgcaccgaacagatggagaagggtgatgtcgggtatattccacaggggtatggccacagcatcgaaaatgttggagatcgtccttgtcgcgtcttgattggctttaacacaggtaactaccaagcgatcgacttatcacagtggattgcaggtaatcccgcggatgttcttgccacgaacttctccaaacccaccagcctctttgaaaagttcccaaaacaggacgtgtttattgctcctggcaag

SEQ ID NO: 1094 - protein, 359 aa, synthetic construct
  REGION 1..359: note = Variant of oxalate decarboxylase from Gemmata sp. SH-PL17
MGDPTFMNNVPDPLLTGKDLPTFKFELEKSKGKVIGGSSGKEATVVQLPISKGIAGVSMVLEPGAMRELHWHATAAEWGFVLWGHVRTTVIDPQGLAETNDFGPGDVWYFPRGHGHMLECLGDKPAHFILIFDNGYFSEFGTFSITDWIGHTPKALLAKNFKLPESAFDGFPKKEVYFARGAVPPATPAAPLQGLKLPPLTHKYELLEQEPHKVFKGGREWRVDSTRFPISKTVTGVVLDLEPGALRELHWHPNADEWQYVIDGNISVTMFGSHGRVRTEQMEKGDVGYIPQGYGHSIENVGDRPCRVLIGFNTGNYQAIDLSQWIAGNPADVLATNFSKPTSLFEKFPKQDVFIAPGK

SEQ ID NO: 1095 - DNA, 1077 bp, synthetic construct
  misc_feature 1..1077: note = Variant of oxalate decarboxylase from Gemmata sp. SH-PL17
  source 1..1077: mol_type = other DNA
atgggtgaccctacctttatgaacaatgtaccagaccctctgctgtcgggcaaagatttgccgacgttcaagtttgagctggaaaagagcaagggcaaagtcattggggggagttcgggaaaagaagcaaccgttgtccagttacctatctccaaaggcattgctggtgtgagcatggtacttgaaccgggtgcgatgcgcgaattgcactggcatgccacagcagcagagtgggggttcgtattatggggccacgtccgtacgacggtgatcgatccacaaggtctggccgaaaccaacgactttggaccgggcgacgtgtggtattttcctcgcggtcatgggcacatgctggaatgcctgggcgataaaccggcgcatttcattctgatcttcgataacggctacttctcagagtttggcaccttctctattactgactggatcggtcacacaccgaaagcgcttctcgccaagaactttaagctgcccgaaagcgcttttgatgggtttcccaaaaaagaggtctattttgcacgtggcgcggttccaccagccacccctgcagcgcctttacagggactgaagctgccaccactcacgcataaatacgaactcctcgaacaaatgcctcataaagtttttaaaggtggtcgtgaatggcgcgtggatagcactcgttttcccatttccaagactgtaaccggcgttgttcttgatttggaacccggcgcgttacgcgagcttcactggcatcctaatgctgacgagtggcaatatgtgatcgatggcaacattagtgtgacgatgttcggttctcatggccgtgtacgcaccgaacagatggagaagggtgatgtcgggtatattccacaggggtatggccacagcatcgaaaatgttggagatcgtccttgtcgcgtcttgattggctttaacacaggtaactaccaagcgatcgacttatcacagtggattgcaggtaatcccgcggatgttcttgccacgaacttctccaaacccaccagcctctttgaaaagttcccaaaacaggacgtgtttattgctcctggcaag

SEQ ID NO: 1096 - protein, 359 aa, synthetic construct
  REGION 1..359: note = Variant of oxalate decarboxylase from Gemmata sp. SH-PL17
MGDPTFMNNVPDPLLSGKDLPTFKFELEKSKGKVIGGSSGKEATVVQLPISKGIAGVSMVLEPGAMRELHWHATAAEWGFVLWGHVRTTVIDPQGLAETNDFGPGDVWYFPRGHGHMLECLGDKPAHFILIFDNGYFSEFGTFSITDWIGHTPKALLAKNFKLPESAFDGFPKKEVYFARGAVPPATPAAPLQGLKLPPLTHKYELLEQMPHKVFKGGREWRVDSTRFPISKTVTGVVLDLEPGALRELHWHPNADEWQYVIDGNISVTMFGSHGRVRTEQMEKGDVGYIPQGYGHSIENVGDRPCRVLIGFNTGNYQAIDLSQWIAGNPADVLATNFSKPTSLFEKFPKQDVFIAPGK

SEQ ID NO: 1097 - DNA, 1077 bp, synthetic construct
  misc_feature 1..1077: note = Variant of oxalate decarboxylase from Gemmata sp. SH-PL17
  source 1..1077: mol_type = other DNA
atgggtgaccctacctttatgaacaatgtaccagaccctctgctgtcgggcaaagatttgccgacgttcaagtttgagctggaaaagagcaagggcaaagtcattggggggagttcgggaaaagaagcaaccgttgtccagttacctatctccaaaggcattgctggtgtgagcatggtacttgaaccgggtgcgatgcgcgaattgcactggcatgccacagcagcagagtgggggttcgtattatggggccacgtccgtacgacggtgatcgatccacaaggtctggccgaaaccaacgactttggaccgggcgacgtgtggtattttcctcgcggtcatgggcacatgctggaatgcctgggcgataaaccggcgcatttcattctgatcttcgataacggctacttctcagagtttggcaccttctctattactgactggatcggtcacacaccgaaagcgcttctcgccaagaacttttatctgcccgaaagcgcttttgatgggtttcccaaaaaagaggtctattttgcacgtggcgcggttccaccagccacccctgcagcgcctttacagggactgaagctgccaccactcacgcataaatacgaactcctcgaacaagaacctcataaagtttttaaaggtggtcgtgaatggcgcgtggatagcactcgttttcccatttccaagactgtaaccggcgttgttcttgatttggaacccggcgcgttacgcgagcttcactggcatcctaatgctgacgagtggcaatatgtgatcgatggcaacattagtgtgacgatgttcggttctcatggccgtgtacgcaccgaacagatggagaagggtgatgtcgggtatattccacaggggtatggccacagcatcgaaaatgttggagatcgtccttgtcgcgtcttgattggctttaacacaggtaactaccaagcgatcgacttatcacagtggattgcaggtaatcccgcggatgttcttgccacgaacttctccaaacccaccagcctctttgaaaagttcccaaaacaggacgtgtttattgctcctggcaag

SEQ ID NO: 1098 - protein, 359 aa, synthetic construct
  REGION 1..359: note = Variant of oxalate decarboxylase from Gemmata sp. SH-PL17
MGDPTFMNNVPDPLLSGKDLPTFKFELEKSKGKVIGGSSGKEATVVQLPISKGIAGVSMVLEPGAMRELHWHATAAEWGFVLWGHVRTTVIDPQGLAETNDFGPGDVWYFPRGHGHMLECLGDKPAHFILIFDNGYFSEFGTFSITDWIGHTPKALLAKNFYLPESAFDGFPKKEVYFARGAVPPATPAAPLQGLKLPPLTHKYELLEQEPHKVFKGGREWRVDSTRFPISKTVTGVVLDLEPGALRELHWHPNADEWQYVIDGNISVTMFGSHGRVRTEQMEKGDVGYIPQGYGHSIENVGDRPCRVLIGFNTGNYQAIDLSQWIAGNPADVLATNFSKPTSLFEKFPKQDVFIAPGK

SEQ ID NO: 1099 - DNA, 1077 bp, synthetic construct
  misc_feature 1..1077: note = Variant of oxalate decarboxylase from Gemmata sp. SH-PL17
  source 1..1077: mol_type = other DNA
atgggtgaccctacctttatgaacaatgtaccagaccctctgctgccgggcaaagatttgccgacgttcaagtttgagctggaaaagagcaagggcaaagtcattggggggagttcgggaaaagaagcaaccgttgtccagttacctatctccaaaggcattgctggtgtgagcatggtacttgaaccgggtgcgatgcgcgaattgcactggcatgccacagcagcagagtgggggttcgtattatggggccacgtccgtacgacggtgatcgatccacaaggtctggccgaaaccaacgactttggaccgggcgacgtgtggtattttcctcgcggtcatgggcacatgctggaatgcctgggcgataaaccggcgcatttcattctgatcttcgataacggctacttctcagagtttggcaccttctctattactgactggatcggtcacacaccgaaagcgcttctcgccaagaactttaagctgcccgaaagcgcttttgatgggtttcccaaaaaagaggtctattttgcacgtggcgcggttccaccagccacccctgcagcgcctttacagggactgaagctgccaccactcacgcataaatacgaactcctcgaacaagaacctcataaagtttttaaaggtggtcgtgaatggcgcgtggatagcactcgttttcccatttccaagactgtaaccggcgttgttcttgatttggaacccggcgcgttacgcgagcttcactggcatcctaatgctgacgagtggcaatatgtgatcgatggcaacattagtgtgacgatgttcggttctcatggccgtgtacgcaccgaacagatggagaagggtgatgtcgggtatattccacaggggtatggccacagcatcgaaaatgttggagatcgtccttgtcgcgtcttgattggctttaacacaggtaactaccaagcgatcgacttatcacagtggattgcaggtaatcccgcggatgttcttgccacgaacttctccaaacccaccagcctctttgaaaagttcccaaaacaggacgtgtttattgctcctggcaag

SEQ ID NO: 1100 - protein, 359 aa, synthetic construct
  REGION 1..359: note = Variant of oxalate decarboxylase from Gemmata sp. SH-PL17
MGDPTFMNNVPDPLLPGKDLPTFKFELEKSKGKVIGGSSGKEATVVQLPISKGIAGVSMVLEPGAMRELHWHATAAEWGFVLWGHVRTTVIDPQGLAETNDFGPGDVWYFPRGHGHMLECLGDKPAHFILIFDNGYFSEFGTFSITDWIGHTPKALLAKNFKLPESAFDGFPKKEVYFARGAVPPATPAAPLQGLKLPPLTHKYELLEQEPHKVFKGGREWRVDSTRFPISKTVTGVVLDLEPGALRELHWHPNADEWQYVIDGNISVTMFGSHGRVRTEQMEKGDVGYIPQGYGHSIENVGDRPCRVLIGFNTGNYQAIDLSQWIAGNPADVLATNFSKPTSLFEKFPKQDVFIAPGK

SEQ ID NO: 1101 - DNA, 1077 bp, synthetic construct
  misc_feature 1..1077: note = Variant of oxalate decarboxylase from Gemmata sp. SH-PL17
  source 1..1077: mol_type = other DNA
atgggtgaccctacctttatgaacaatgtaccagaccctctgctgtcgggcaaagatttgccgacgttcaagtttgagctggaaaagagcaagggcaaagtcattggggggagttcgggaaaagaagcaaccgttgtccagttacctatctccaaaggcattgctggtgtgagcatggtacttgaaccgggtgcgatgcgcgaattgcactggcatgccacagcagcagagtgggggttcgtattagagggccacgtccgtacgacggtgatcgatccacaaggtctggccgaaaccaacgactttggaccgggcgacgtgtggtattttcctcgcggtcatgggcacatgctggaatgcctgggcgataaaccggcgcatttcattctgatcttcgataacggctacttctcagagtttggcaccttctctattactgactggatcggtcacacaccgaaagcgcttctcgccaagaactttaagctgcccgaaagcgcttttgatgggtttcccaaaaaagaggtctattttgcacgtggcgcggttccaccagccacccctgcagcgcctttacagggactgaagctgccaccactcacgcataaatacgaactcctcgaacaagaacctcataaagtttttaaaggtggtcgtgaatggcgcgtggatagcactcgttttcccatttccaagactgtaaccggcgttgttcttgatttggaacccggcgcgttacgcgagcttcactggcatcctaatgctgacgagtggcaatatgtgatcgatggcaacattagtgtgacgatgttcggttctcatggccgtgtacgcaccgaacagatggagaagggtgatgtcgggtatattccacaggggtatggccacagcatcgaaaatgttggagatcgtccttgtcgcgtcttgattggctttaacacaggtaactaccaagcgatcgacttatcacagtggattgcaggtaatcccgcggatgttcttgccacgaacttctccaaacccaccagcctctttgaaaagttcccaaaacaggacgtgtttattgctcctggcaag

SEQ ID NO: 1102 - protein, 359 aa, synthetic construct
  REGION 1..359: note = Variant of oxalate decarboxylase from Gemmata sp. SH-PL17
MGDPTFMNNVPDPLLSGKDLPTFKFELEKSKGKVIGGSSGKEATVVQLPISKGIAGVSMVLEPGAMRELHWHATAAEWGFVLEGHVRTTVIDPQGLAETNDFGPGDVWYFPRGHGHMLECLGDKPAHFILIFDNGYFSEFGTFSITDWIGHTPKALLAKNFKLPESAFDGFPKKEVYFARGAVPPATPAAPLQGLKLPPLTHKYELLEQEPHKVFKGGREWRVDSTRFPISKTVTGVVLDLEPGALRELHWHPNADEWQYVIDGNISVTMFGSHGRVRTEQMEKGDVGYIPQGYGHSIENVGDRPCRVLIGFNTGNYQAIDLSQWIAGNPADVLATNFSKPTSLFEKFPKQDVFIAPGK

SEQ ID NO: 1103 - DNA, 1077 bp, synthetic construct
  misc_feature 1..1077: note = Variant of oxalate decarboxylase from Gemmata sp. SH-PL17
  source 1..1077: mol_type = other DNA
atgggtgaccctacctttatgaacaatgtaccagaccctctgctgtcgggcaaagatttgccgacgttcaagtttgagctggaaaagagcaagggcaaagtcattggggggagttcgggaaaagaagcaaccgttgtccagttacctatctccaaaggcattgctggtgtgagcatggtacttgaaccgggtgcgatgcgcgaattgcactggcatgccacagcagcagagtgggggttcgtattatggggccacgtccgtacgacggtgatcgatccacaaggtctggccgaaaccaacgactttggaccgggcgacgtgtggtattttcctcgcggtcatgggcacatgctggaatgcctgggcgataaaccggcgcatttcattctgatcttcgataacggctacttctcagagtttggcaccttctctattactgactggatcggtcacacaccgaaagcgcttctcgccaagaactttaagctgcccgaaagcgcttttgatgggtttcccaaaaaagaggtctattttgcacgtggcgcggttccaccagccacccctgcagcgcctttacagggactgaagctgccaccactcacgcataaatacgaactcctcgaacaagaacctcataaagtttttaaaggtggtcgtgaatggcgcgtggatagcactcgttttcccatttccaagactgtaaccggcgttgttcttgatttggaacccggcgcgttacgcgagcttcactggcatcctaatgctgacgagtggcaatatgtgatcgatggcaacattagtgtgacgatgttcggttctcatggccgtatgcgcaccgaacagatggagaagggtgatgtcgggtatattccacaggggtatggccacagcatcgaaaatgttggagatcgtccttgtcgcgtcttgattggctttaacacaggtaactaccaagcgatcgacttatcacagtggattgcaggtaatcccgcggatgttcttgccacgaacttctccaaacccaccagcctctttgaaaagttcccaaaacaggacgtgtttattgctcctggcaag

SEQ ID NO: 1104 - protein, 359 aa, synthetic construct
  REGION 1..359: note = Variant of oxalate decarboxylase from Gemmata sp. SH-PL17
MGDPTFMNNVPDPLLSGKDLPTFKFELEKSKGKVIGGSSGKEATVVQLPISKGIAGVSMVLEPGAMRELHWHATAAEWGFVLWGHVRTTVIDPQGLAETNDFGPGDVWYFPRGHGHMLECLGDKPAHFILIFDNGYFSEFGTFSITDWIGHTPKALLAKNFKLPESAFDGFPKKEVYFARGAVPPATPAAPLQGLKLPPLTHKYELLEQEPHKVFKGGREWRVDSTRFPISKTVTGVVLDLEPGALRELHWHPNADEWQYVIDGNISVTMFGSHGRMRTEQMEKGDVGYIPQGYGHSIENVGDRPCRVLIGFNTGNYQAIDLSQWIAGNPADVLATNFSKPTSLFEKFPKQDVFIAPGK

SEQ ID NO: 1105 - DNA, 1077 bp, synthetic construct
  misc_feature 1..1077: note = Variant of oxalate decarboxylase from Gemmata sp. SH-PL17
  source 1..1077: mol_type = other DNA
atgggtgaccctacctttatgaacaatgtaccagaccctctgctgtcgggcaaagatttgccgacgttcaagtttgagctggaaaagagcaagggcaaagtcattggggggagttcgggaaaagaagcaaccgttgtccagttacctatctccaaaggcattgctggtgtgagcatggtacttgaaccgggtgcgatgcgcgaattgcactggcatgccacagcagcagagtgggggttcgtattatggggccacgtccgtacgacggtgatcgatccacaaggtctggccgaaaccaacgactttggaccgggcgacgtgtggtattttcctcgcggtcatgggcacatgctggaatgcctgggcgataaaccggcgcatttcattctgatcttcgataacggctacttctcagagtttggcaccttctctattactgactggatcggtcacacaccgaaagcgcttctcgccaagaactttaagctgcccgaaagcgcttttgatgggtttcccaaactggaggtctattttgcacgtggcgcggttccaccagccacccctgcagcgcctttacagggactgaagctgccaccactcacgcataaatacgaactcctcgaacaagaacctcataaagtttttaaaggtggtcgtgaatggcgcgtggatagcactcgttttcccatttccaagactgtaaccggcgttgttcttgatttggaacccggcgcgttacgcgagcttcactggcatcctaatgctgacgagtggcaatatgtgatcgatggcaacattagtgtgacgatgttcggttctcatggccgtgtacgcaccgaacagatggagaagggtgatgtcgggtatattccacaggggtatggccacagcatcgaaaatgttggagatcgtccttgtcgcgtcttgattggctttaacacaggtaactaccaagcgatcgacttatcacagtggattgcaggtaatcccgcggatgttcttgccacgaacttctccaaacccaccagcctctttgaaaagttcccaaaacaggacgtgtttattgctcctggcaag

SEQ ID NO: 1106 - protein, 359 aa, synthetic construct
  REGION 1..359: note = Variant of oxalate decarboxylase from Gemmata sp. SH-PL17
MGDPTFMNNVPDPLLSGKDLPTFKFELEKSKGKVIGGSSGKEATVVQLPISKGIAGVSMVLEPGAMRELHWHATAAEWGFVLWGHVRTTVIDPQGLAETNDFGPGDVWYFPRGHGHMLECLGDKPAHFILIFDNGYFSEFGTFSITDWIGHTPKALLAKNFKLPESAFDGFPKLEVYFARGAVPPATPAAPLQGLKLPPLTHKYELLEQEPHKVFKGGREWRVDSTRFPISKTVTGVVLDLEPGALRELHWHPNADEWQYVIDGNISVTMFGSHGRVRTEQMEKGDVGYIPQGYGHSIENVGDRPCRVLIGFNTGNYQAIDLSQWIAGNPADVLATNFSKPTSLFEKFPKQDVFIAPGK

SEQ ID NO: 1107 - DNA, 1077 bp, synthetic construct
  misc_feature 1..1077: note = Variant of oxalate decarboxylase from Gemmata sp. SH-PL17
  source 1..1077: mol_type = other DNA
atgggtgaccctacctttatgaacaatgtaccagaccctctgctgtcggtgaaagatttgccgacgttcaagtttgagctggaaaagagcaagggcaaagtcattggggggagttcgggaaaagaagcaaccgttgtccagttacctatctccaaaggcattgctggtgtgagcatggtacttgaaccgggtgcgatgcgcgaattgcactggcatgccacagcagcagagtgggggttcgtattatggggccacgtccgtacgacggtgatcgatccacaaggtctggccgaaaccaacgactttggaccgggcgacgtgtggtattttcctcgcggtcatgggcacatgctggaatgcctgggcgataaaccggcgcatttcattctgatcttcgataacggctacttctcagagtttggcaccttctctattactgactggatcggtcacacaccgaaagcgcttctcgccaagaactttaagctgcccgaaagcgcttttgatgggtttcccaaaaaagaggtctattttgcacgtggcgcggttccaccagccacccctgcagcgcctttacagggactgaagctgccaccactcacgcataaatacgaactcctcgaacaagaacctcataaagtttttaaaggtggtcgtgaatggcgcgtggatagcactcgttttcccatttccaagactgtaaccggcgttgttcttgatttggaacccggcgcgttacgcgagcttcactggcatcctaatgctgacgagtggcaatatgtgatcgatggcaacattagtgtgacgatgttcggttctcatggccgtgtacgcaccgaacagatggagaagggtgatgtcgggtatattccacaggggtatggccacagcatcgaaaatgttggagatcgtccttgtcgcgtcttgattggctttaacacaggtaactaccaagcgatcgacttatcacagtggattgcaggtaatcccgcggatgttcttgccacgaacttctccaaacccaccagcctctttgaaaagttcccaaaacaggacgtgtttattgctcctggcaag

SEQ ID NO: 1108 - protein, 359 aa, synthetic construct
  REGION 1..359: note = Variant of oxalate decarboxylase from Gemmata sp. SH-PL17
MGDPTFMNNVPDPLLSVKDLPTFKFELEKSKGKVIGGSSGKEATVVQLPISKGIAGVSMVLEPGAMRELHWHATAAEWGFVLWGHVRTTVIDPQGLAETNDFGPGDVWYFPRGHGHMLECLGDKPAHFILIFDNGYFSEFGTFSITDWIGHTPKALLAKNFKLPESAFDGFPKKEVYFARGAVPPATPAAPLQGLKLPPLTHKYELLEQEPHKVFKGGREWRVDSTRFPISKTVTGVVLDLEPGALRELHWHPNADEWQYVIDGNISVTMFGSHGRVRTEQMEKGDVGYIPQGYGHSIENVGDRPCRVLIGFNTGNYQAIDLSQWIAGNPADVLATNFSKPTSLFEKFPKQDVFIAPGK

SEQ ID NO: 1109 - DNA, 1077 bp, synthetic construct
  misc_feature 1..1077: note = Variant of oxalate decarboxylase from Gemmata sp. SH-PL17
  source 1..1077: mol_type = other DNA
atgggtgaccctacctttatgaacaatgtaccagaccctctgctgtcggagaaagatttgccgacgttcaagtttgagctggaaaagagcaagggcaaagtcattggggggagttcgggaaaagaagcaaccgttgtccagttacctatctccaaaggcattgctggtgtgagcatggtacttgaaccgggtgcgatgcgcgaattgcactggcatgccacagcagcagagtgggggttcgtattatggggccacgtccgtacgacggtgatcgatccacaaggtctggccgaaaccaacgactttggaccgggcgacgtgtggtattttcctcgcggtcatgggcacatgctggaatgcctgggcgataaaccggcgcatttcattctgatcttcgataacggctacttctcagagtttggcaccttctctattactgactggatcggtcacacaccgaaagcgcttctcgccaagaactttaagctgcccgaaagcgcttttgatgggtttcccaaaaaagaggtctattttgcacgtggcgcggttccaccagccacccctgcagcgcctttacagggactgaagctgccaccactcacgcataaatacgaactcctcgaacaagaacctcataaagtttttaaaggtggtcgtgaatggcgcgtggatagcactcgttttcccatttccaagactgtaaccggcgttgttcttgatttggaacccggcgcgttacgcgagcttcactggcatcctaatgctgacgagtggcaatatgtgatcgatggcaacattagtgtgacgatgttcggttctcatggccgtgtacgcaccgaacagatggagaagggtgatgtcgggtatattccacaggggtatggccacagcatcgaaaatgttggagatcgtccttgtcgcgtcttgattggctttaacacaggtaactaccaagcgatcgacttatcacagtggattgcaggtaatcccgcggatgttcttgccacgaacttctccaaacccaccagcctctttgaaaagttcccaaaacaggacgtgtttattgctcctggcaag

SEQ ID NO: 1110 - protein, 359 aa, synthetic construct
  REGION 1..359: note = Variant of oxalate decarboxylase from Gemmata sp. SH-PL17
MGDPTFMNNVPDPLLSEKDLPTFKFELEKSKGKVIGGSSGKEATVVQLPISKGIAGVSMVLEPGAMRELHWHATAAEWGFVLWGHVRTTVIDPQGLAETNDFGPGDVWYFPRGHGHMLECLGDKPAHFILIFDNGYFSEFGTFSITDWIGHTPKALLAKNFKLPESAFDGFPKKEVYFARGAVPPATPAAPLQGLKLPPLTHKYELLEQEPHKVFKGGREWRVDSTRFPISKTVTGVVLDLEPGALRELHWHPNADEWQYVIDGNISVTMFGSHGRVRTEQMEKGDVGYIPQGYGHSIENVGDRPCRVLIGFNTGNYQAIDLSQWIAGNPADVLATNFSKPTSLFEKFPKQDVFIAPGK

SEQ ID NO: 1111 - DNA, 1077 bp, synthetic construct
  misc_feature 1..1077: note = Variant of oxalate decarboxylase from Gemmata sp. SH-PL17
  source 1..1077: mol_type = other DNA
atgggtgaccctacctttatgaacaatgtaccagaccctctgctgtcgctgaaagatttgccgacgttcaagtttgagctggaaaagagcaagggcaaagtcattggggggagttcgggaaaagaagcaaccgttgtccagttacctatctccaaaggcattgctggtgtgagcatggtacttgaaccgggtgcgatgcgcgaattgcactggcatgccacagcagcagagtgggggttcgtattatggggccacgtccgtacgacggtgatcgatccacaaggtctggccgaaaccaacgactttggaccgggcgacgtgtggtattttcctcgcggtcatgggcacatgctggaatgcctgggcgataaaccggcgcatttcattctgatcttcgataacggctacttctcagagtttggcaccttctctattactgactggatcggtcacacaccgaaagcgcttctcgccaagaactttaagctgcccgaaagcgcttttgatgggtttcccaaaaaagaggtctattttgcacgtggcgcggttccaccagccacccctgcagcgcctttacagggactgaagctgccaccactcacgcataaatacgaactcctcgaacaagaacctcataaagtttttaaaggtggtcgtgaatggcgcgtggatagcactcgttttcccatttccaagactgtaaccggcgttgttcttgatttggaacccggcgcgttacgcgagcttcactggcatcctaatgctgacgagtggcaatatgtgatcgatggcaacattagtgtgacgatgttcggttctcatggccgtgtacgcaccgaacagatggagaagggtgatgtcgggtatattccacaggggtatggccacagcatcgaaaatgttggagatcgtccttgtcgcgtcttgattggctttaacacaggtaactaccaagcgatcgacttatcacagtggattgcaggtaatcccgcggatgttcttgccacgaacttctccaaacccaccagcctctttgaaaagttcccaaaacaggacgtgtttattgctcctggcaag

SEQ ID NO: 1112 - protein, 359 aa, synthetic construct
  REGION 1..359: note = Variant of oxalate decarboxylase from Gemmata sp. SH-PL17
MGDPTFMNNVPDPLLSLKDLPTFKFELEKSKGKVIGGSSGKEATVVQLPISKGIAGVSMVLEPGAMRELHWHATAAEWGFVLWGHVRTTVIDPQGLAETNDFGPGDVWYFPRGHGHMLECLGDKPAHFILIFDNGYFSEFGTFSITDWIGHTPKALLAKNFKLPESAFDGFPKKEVYFARGAVPPATPAAPLQGLKLPPLTHKYELLEQEPHKVFKGGREWRVDSTRFPISKTVTGVVLDLEPGALRELHWHPNADEWQYVIDGNISVTMFGSHGRVRTEQMEKGDVGYIPQGYGHSIENVGDRPCRVLIGFNTGNYQAIDLSQWIAGNPADVLATNFSKPTSLFEKFPKQDVFIAPGK

SEQ ID NO: 1113 - DNA, 1077 bp, synthetic construct
  misc_feature 1..1077: note = Variant of oxalate decarboxylase from Gemmata sp. SH-PL17
  source 1..1077: mol_type = other DNA
atgggtgaccctacctttatgaacaatgtaccagaccctctgctgtcgggcaaagatttgccgacgttcaagtttgagctggaaaagagcaagggcaaagtcattggggggagttcgggaaaagaagcaaccgttgtccagttacctatctccaaaggcattgctggtgtgagcatggtacttgaaccgggtgcgatgcgcgaattgcactggcatgccacagcagcagagtgggggttcgtattatggggccacgtccgtacgacggtgatcgatccacaaggtatggccgaaaccaacgactttggaccgggcgacgtgtggtattttcctcgcggtcatgggcacatgctggaatgcctgggcgataaaccggcgcatttcattctgatcttcgataacggctacttctcagagtttggcaccttctctattactgactggatcggtcacacaccgaaagcgcttctcgccaagaactttaagctgcccgaaagcgcttttgatgggtttcccaaaaaagaggtctattttgcacgtggcgcggttccaccagccacccctgcagcgcctttacagggactgaagctgccaccactcacgcataaatacgaactcctcgaacaagaacctcataaagtttttaaaggtggtcgtgaatggcgcgtggatagcactcgttttcccatttccaagactgtaaccggcgttgttcttgatttggaacccggcgcgttacgcgagcttcactggcatcctaatgctgacgagtggcaatatgtgatcgatggcaacattagtgtgacgatgttcggttctcatggccgtgtacgcaccgaacagatggagaagggtgatgtcgggtatattccacaggggtatggccacagcatcgaaaatgttggagatcgtccttgtcgcgtcttgattggctttaacacaggtaactaccaagcgatcgacttatcacagtggattgcaggtaatcccgcggatgttcttgccacgaacttctccaaacccaccagcctctttgaaaagttcccaaaacaggacgtgtttattgctcctggcaag

SEQ ID NO: 1114 - protein, 359 aa, synthetic construct
  REGION 1..359: note = Variant of oxalate decarboxylase from Gemmata sp. SH-PL17
MGDPTFMNNVPDPLLSGKDLPTFKFELEKSKGKVIGGSSGKEATVVQLPISKGIAGVSMVLEPGAMRELHWHATAAEWGFVLWGHVRTTVIDPQGMAETNDFGPGDVWYFPRGHGHMLECLGDKPAHFILIFDNGYFSEFGTFSITDWIGHTPKALLAKNFKLPESAFDGFPKKEVYFARGAVPPATPAAPLQGLKLPPLTHKYELLEQEPHKVFKGGREWRVDSTRFPISKTVTGVVLDLEPGALRELHWHPNADEWQYVIDGNISVTMFGSHGRVRTEQMEKGDVGYIPQGYGHSIENVGDRPCRVLIGFNTGNYQAIDLSQWIAGNPADVLATNFSKPTSLFEKFPKQDVFIAPGK

SEQ ID NO: 1115 - DNA, 1077 bp, synthetic construct
  misc_feature 1..1077: note = Variant of oxalate decarboxylase from Gemmata sp. SH-PL17
  source 1..1077: mol_type = other DNA
atgggtgaccctacctttatgaacaatgtaccagaccctctgctgtcgggcaaagatttgccgacgttcaagtttgagctggaaaagagcaagggcaaagtcattggggggagttcgggaaaagaagcaaccgttgtccagttacctatctccaaaggcattgctggtgtgagcatggtacttgaaccgggtgcgatgcgcgaattgcactggcatgccacagcagcagagtgggggttcgtattatggggccacgtccgtacgacggtgatcgatccacaaggtctggccgaaaccaacgactttggaccgggcgacgtgtggtattttcctcgcggtcatgggcacatgctggaatgcctgggcgataaaccggcgcatttcattctgatcttcgataacggctacttctcagagtttggcaccttctctattactgactggatcggtcacacaccgaaagcgcttctcgccaagaactttaagctgcccgaaagcgcttttgatgggtttcccaaaaaagaggtctattttgcacgtggcgcggttccaccagccacccctgcagcgcctttacagggactgaagctgccaccactcacgcataaatacgaactcctcgaacaagaacctcataaagtttttaaaggtggtcgtgaatggcgcgtggatagcactcgttttcccatttccaagactgtaaccggcgttgttcttgatttggaacccggcgcgttacgcgagcttcactggcatcctaatgctgacgagtggcaatatgtgatcgatggcaacattagtgtgacgatgttcggttctcatggccgtgtacgcaccgaacagatggagaagggtgatgtcgggtatattccacaggggtatggccacagcatcgaaaatgttggagatcgtccttgtcgcgtcttgattggctttaacacaggtaactacgttgcgatcgacttatcacagtggattgcaggtaatcccgcggatgttcttgccacgaacttctccaaacccaccagcctctttgaaaagttcccaaaacaggacgtgtttattgctcctggcaag

SEQ ID NO: 1116 - protein, 359 aa, synthetic construct
  REGION 1..359: note = Variant of oxalate decarboxylase from Gemmata sp. SH-PL17
MGDPTFMNNVPDPLLSGKDLPTFKFELEKSKGKVIGGSSGKEATVVQLPISKGIAGVSMVLEPGAMRELHWHATAAEWGFVLWGHVRTTVIDPQGLAETNDFGPGDVWYFPRGHGHMLECLGDKPAHFILIFDNGYFSEFGTFSITDWIGHTPKALLAKNFKLPESAFDGFPKKEVYFARGAVPPATPAAPLQGLKLPPLTHKYELLEQEPHKVFKGGREWRVDSTRFPISKTVTGVVLDLEPGALRELHWHPNADEWQYVIDGNISVTMFGSHGRVRTEQMEKGDVGYIPQGYGHSIENVGDRPCRVLIGFNTGNYVAIDLSQWIAGNPADVLATNFSKPTSLFEKFPKQDVFIAPGK

SEQ ID NO: 1117 - DNA, 1077 bp, synthetic construct
  misc_feature 1..1077: note = Variant of oxalate decarboxylase from Gemmata sp. SH-PL17
  source 1..1077: mol_type = other DNA
atgggtgaccctacctttatgaacaatgtaccagaccctctgctgtcgggcaaagatttgccgacgttcaagtttgagctggaaaagagcaagggcaaagtcattggggggagttcgggaaaagaagcaaccgttgtccagttacctatctccaaaggcattgctggtgtgagcatggtacttgaaccgggtgcgatgcgcgaattgcactggcatgccacagcagcagagtgggggttcgtattatggggccacgtccgtacgacggtgatcgatccacaaggtctggccgaaaccaacgactttggaccgggcgacgtgtggtattttcctcgcggtcatgggcacatgctggaatgcctgggcgataaaccggcgcatttcattctgatcttcgataacggctacttctcagagtttggcaccttctctattactgactggatcggtcacacaccgaaagcgcttctcgccaagaactttaagctgcccgaaagcgcttttgatgggtttcccaaaagggaggtctattttgcacgtggcgcggttccaccagccacccctgcagcgcctttacagggactgaagctgccaccactcacgcataaatacgaactcctcgaacaagaacctcataaagtttttaaaggtggtcgtgaatggcgcgtggatagcactcgttttcccatttccaagactgtaaccggcgttgttcttgatttggaacccggcgcgttacgcgagcttcactggcatcctaatgctgacgagtggcaatatgtgatcgatggcaacattagtgtgacgatgttcggttctcatggccgtgtacgcaccgaacagatggagaagggtgatgtcgggtatattccacaggggtatggccacagcatcgaaaatgttggagatcgtccttgtcgcgtcttgattggctttaacacaggtaactaccaagcgatcgacttatcacagtggattgcaggtaatcccgcggatgttcttgccacgaacttctccaaacccaccagcctctttgaaaagttcccaaaacaggacgtgtttattgctcctggcaag

SEQ ID NO: 1118 - protein, 359 aa, synthetic construct
  REGION 1..359: note = Variant of oxalate decarboxylase from Gemmata sp. SH-PL17
MGDPTFMNNVPDPLLSGKDLPTFKFELEKSKGKVIGGSSGKEATVVQLPISKGIAGVSMVLEPGAMRELHWHATAAEWGFVLWGHVRTTVIDPQGLAETNDFGPGDVWYFPRGHGHMLECLGDKPAHFILIFDNGYFSEFGTFSITDWIGHTPKALLAKNFKLPESAFDGFPKREVYFARGAVPPATPAAPLQGLKLPPLTHKYELLEQEPHKVFKGGREWRVDSTRFPISKTVTGVVLDLEPGALRELHWHPNADEWQYVIDGNISVTMFGSHGRVRTEQMEKGDVGYIPQGYGHSIENVGDRPCRVLIGFNTGNYQAIDLSQWIAGNPADVLATNFSKPTSLFEKFPKQDVFIAPGK

SEQ ID NO: 1119 - DNA, 1077 bp, synthetic construct
  misc_feature 1..1077: note = Variant of oxalate decarboxylase from Gemmata sp. SH-PL17
  source 1..1077: mol_type = other DNA
atgggtgaccctacctttatgaacaatgtaccagacagtctgctgtcgggcaaagatttgccgacgttcaagtttgagctggaaaagagcaagggcaaagtcattggggggagttcgggaaaagaagcaaccgttgtccagttacctatctccaaaggcattgctggtgtgagcatggtacttgaaccgggtgcgatgcgcgaattgcactggcatgccacagcagcagagtgggggttcgtattatggggccacgtccgtacgacggtgatcgatccacaaggtctggccgaaaccaacgactttggaccgggcgacgtgtggtattttcctcgcggtcatgggcacatgctggaatgcctgggcgataaaccggcgcatttcattctgatcttcgataacggctacttctcagagtttggcaccttctctattactgactggatcggtcacacaccgaaagcgcttctcgccaagaactttaagctgcccgaaagcgcttttgatgggtttcccaaaaaagaggtctattttgcacgtggcgcggttccaccagccacccctgcagcgcctttacagggactgaagctgccaccactcacgcataaatacgaactcctcgaacaagaacctcataaagtttttaaaggtggtcgtgaatggcgcgtggatagcactcgttttcccatttccaagactgtaaccggcgttgttcttgatttggaacccggcgcgttacgcgagcttcactggcatcctaatgctgacgagtggcaatatgtgatcgatggcaacattagtgtgacgatgttcggttctcatggccgtgtacgcaccgaacagatggagaagggtgatgtcgggtatattccacaggggtatggccacagcatcgaaaatgttggagatcgtccttgtcgcgtcttgattggctttaacacaggtaactaccaagcgatcgacttatcacagtggattgcaggtaatcccgcggatgttcttgccacgaacttctccaaacccaccagcctctttgaaaagttcccaaaacaggacgtgtttattgctcctggcaag

SEQ ID NO: 1120 - protein, 359 aa, synthetic construct
  REGION 1..359: note = Variant of oxalate decarboxylase from Gemmata sp. SH-PL17
MGDPTFMNNVPDSLLSGKDLPTFKFELEKSKGKVIGGSSGKEATVVQLPISKGIAGVSMVLEPGAMRELHWHATAAEWGFVLWGHVRTTVIDPQGLAETNDFGPGDVWYFPRGHGHMLECLGDKPAHFILIFDNGYFSEFGTFSITDWIGHTPKALLAKNFKLPESAFDGFPKKEVYFARGAVPPATPAAPLQGLKLPPLTHKYELLEQEPHKVFKGGREWRVDSTRFPISKTVTGVVLDLEPGALRELHWHPNADEWQYVIDGNISVTMFGSHGRVRTEQMEKGDVGYIPQGYGHSIENVGDRPCRVLIGFNTGNYQAIDLSQWIAGNPADVLATNFSKPTSLFEKFPKQDVFIAPGK

SEQ ID NO: 1121 - DNA, 1077 bp, synthetic construct
  misc_feature 1..1077: note = Variant of oxalate decarboxylase from Gemmata sp. SH-PL17
  source 1..1077: mol_type = other DNA
atgggtgaccctacctttatgaacaatgtaccagaccctctgctgtcgggcaaagatttgccgacgttcaagtttgagctggaaaagagcaagggcaaagtcattggggggagttcgggaaaagaagcaaccgttgtccagttacctatctccaaaggcattgctggtgtgagcatggtacttgaaccgggtgcgatgcgcgaattgcactggcatgccacagcagcagagtgggggttcgtattatggggccacgtccgtacgacggtgatcgatccacaaggtctggccgaaaccaacgactttggaccgggcgacgtgtggtattttcctcgcggtcatgggcacatgctggaatgcctgggcgataaaccggcgcatttcattctgatcttcgataacggctacttctcagagtttggcaccttctctattactgactggatcggtcacacaccgaaagcgcttctcgccaagaactttaagctgcccgaaagcgcttttgatgggtttcccaaaacggaggtctattttgcacgtggcgcggttccaccagccacccctgcagcgcctttacagggactgaagctgccaccactcacgcataaatacgaactcctcgaacaagaacctcataaagtttttaaaggtggtcgtgaatggcgcgtggatagcactcgttttcccatttccaagactgtaaccggcgttgttcttgatttggaacccggcgcgttacgcgagcttcactggcatcctaatgctgacgagtggcaatatgtgatcgatggcaacattagtgtgacgatgttcggttctcatggccgtgtacgcaccgaacagatggagaagggtgatgtcgggtatattccacaggggtatggccacagcatcgaaaatgttggagatcgtccttgtcgcgtcttgattggctttaacacaggtaactaccaagcgatcgacttatcacagtggattgcaggtaatcccgcggatgttcttgccacgaacttctccaaacccaccagcctctttgaaaagttcccaaaacaggacgtgtttattgctcctggcaag

SEQ ID NO: 1122 - protein, 359 aa, synthetic construct
  REGION 1..359: note = Variant of oxalate decarboxylase from Gemmata sp. SH-PL17
MGDPTFMNNVPDPLLSGKDLPTFKFELEKSKGKVIGGSSGKEATVVQLPISKGIAGVSMVLEPGAMRELHWHATAAEWGFVLWGHVRTTVIDPQGLAETNDFGPGDVWYFPRGHGHMLECLGDKPAHFILIFDNGYFSEFGTFSITDWIGHTPKALLAKNFKLPESAFDGFPKTEVYFARGAVPPATPAAPLQGLKLPPLTHKYELLEQEPHKVFKGGREWRVDSTRFPISKTVTGVVLDLEPGALRELHWHPNADEWQYVIDGNISVTMFGSHGRVRTEQMEKGDVGYIPQGYGHSIENVGDRPCRVLIGFNTGNYQAIDLSQWIAGNPADVLATNFSKPTSLFEKFPKQDVFIAPGK

SEQ ID NO: 1123 - DNA, 1077 bp, synthetic construct
  misc_feature 1..1077: note = Variant of oxalate decarboxylase from Gemmata sp. SH-PL17
  source 1..1077: mol_type = other DNA
atgggtgaccctacctttatgaacaatgtaccagactatctgctgtcgggcaaagatttgccgacgttcaagtttgagctggaaaagagcaagggcaaagtcattggggggagttcgggaaaagaagcaaccgttgtccagttacctatctccaaaggcattgctggtgtgagcatggtacttgaaccgggtgcgatgcgcgaattgcactggcatgccacagcagcagagtgggggttcgtattatggggccacgtccgtacgacggtgatcgatccacaaggtctggccgaaaccaacgactttggaccgggcgacgtgtggtattttcctcgcggtcatgggcacatgctggaatgcctgggcgataaaccggcgcatttcattctgatcttcgataacggctacttctcagagtttggcaccttctctattactgactggatcggtcacacaccgaaagcgcttctcgccaagaactttaagctgcccgaaagcgcttttgatgggtttcccaaaaaagaggtctattttgcacgtggcgcggttccaccagccacccctgcagcgcctttacagggactgaagctgccaccactcacgcataaatacgaactcctcgaacaagaacctcataaagtttttaaaggtggtcgtgaatggcgcgtggatagcactcgttttcccatttccaagactgtaaccggcgttgttcttgatttggaacccggcgcgttacgcgagcttcactggcatcctaatgctgacgagtggcaatatgtgatcgatggcaacattagtgtgacgatgttcggttctcatggccgtgtacgcaccgaacagatggagaagggtgatgtcgggtatattccacaggggtatggccacagcatcgaaaatgttggagatcgtccttgtcgcgtcttgattggctttaacacaggtaactaccaagcgatcgacttatcacagtggattgcaggtaatcccgcggatgttcttgccacgaacttctccaaacccaccagcctctttgaaaagttcccaaaacaggacgtgtttattgctcctggcaag

SEQ ID NO: 1124 - protein, 359 aa, synthetic construct
  REGION 1..359: note = Variant of oxalate decarboxylase from Gemmata sp. SH-PL17
MGDPTFMNNVPDYLLSGKDLPTFKFELEKSKGKVIGGSSGKEATVVQLPISKGIAGVSMVLEPGAMRELHWHATAAEWGFVLWGHVRTTVIDPQGLAETNDFGPGDVWYFPRGHGHMLECLGDKPAHFILIFDNGYFSEFGTFSITDWIGHTPKALLAKNFKLPESAFDGFPKKEVYFARGAVPPATPAAPLQGLKLPPLTHKYELLEQEPHKVFKGGREWRVDSTRFPISKTVTGVVLDLEPGALRELHWHPNADEWQYVIDGNISVTMFGSHGRVRTEQMEKGDVGYIPQGYGHSIENVGDRPCRVLIGFNTGNYQAIDLSQWIAGNPADVLATNFSKPTSLFEKFPKQDVFIAPGK

SEQ ID NO: 1125 - DNA, 1077 bp, synthetic construct
  misc_feature 1..1077: note = Variant of oxalate decarboxylase from Gemmata sp. SH-PL17
  source 1..1077: mol_type = other DNA
atgggtgaccctacctttatgaacaatgtaccagaccctctgctgtcgggcaaagatttgccgacgttcaagtttgagctggaaaagagcaagggcaaagtcattggggggagttcgggaaaagaagcaaccgttgtccagttacctatctccaaaggcattgctggtgtgagcatggtacttgaaccgggtgcgatgcgcgaattgcactggcatgccacagcagcagagtgggggttcgtattatggggccacgtccgtacgacggtgatcgatccacaaggtctggccgaaaccaacgactttggaccgggcgacgtgtggtattttcctcgcggtcatgggcacatgctggaatgcctgggcgataaaccggcgcatttcattctgatcttcgataacggctacttctcagagtttggcaccttctctattactgactggatcggtcacacaccgaaagcgcttctcgccaagaactttaagctgcccgaaagcgcttttgatgggtttcccaaaaaagaggtctattttgcacgtggcgcggttccaccagccacccctgcagcgcctttacagggagcgaagctgccaccactcacgcataaatacgaactcctcgaacaagaacctcataaagtttttaaaggtggtcgtgaatggcgcgtggatagcactcgttttcccatttccaagactgtaaccggcgttgttcttgatttggaacccggcgcgttacgcgagcttcactggcatcctaatgctgacgagtggcaatatgtgatcgatggcaacattagtgtgacgatgttcggttctcatggccgtgtacgcaccgaacagatggagaagggtgatgtcgggtatattccacaggggtatggccacagcatcgaaaatgttggagatcgtccttgtcgcgtcttgattggctttaacacaggtaactaccaagcgatcgacttatcacagtggattgcaggtaatcccgcggatgttcttgccacgaacttctccaaacccaccagcctctttgaaaagttcccaaaacaggacgtgtttattgctcctggcaag

SEQ ID NO: 1126 - protein, 359 aa, synthetic construct
  REGION 1..359: note = Variant of oxalate decarboxylase from Gemmata sp. SH-PL17
MGDPTFMNNVPDPLLSGKDLPTFKFELEKSKGKVIGGSSGKEATVVQLPISKGIAGVSMVLEPGAMRELHWHATAAEWGFVLWGHVRTTVIDPQGLAETNDFGPGDVWYFPRGHGHMLECLGDKPAHFILIFDNGYFSEFGTFSITDWIGHTPKALLAKNFKLPESAFDGFPKKEVYFARGAVPPATPAAPLQGAKLPPLTHKYELLEQEPHKVFKGGREWRVDSTRFPISKTVTGVVLDLEPGALRELHWHPNADEWQYVIDGNISVTMFGSHGRVRTEQMEKGDVGYIPQGYGHSIENVGDRPCRVLIGFNTGNYQAIDLSQWIAGNPADVLATNFSKPTSLFEKFPKQDVFIAPGK

SEQ ID NO: 1127 - DNA, 1077 bp, synthetic construct
  misc_feature 1..1077: note = Variant of oxalate decarboxylase from Gemmata sp. SH-PL17
  source 1..1077: mol_type = other DNA
atgggtgaccctacctttatgaacaatgtaccagaccctctgctgtcgggcaaagatttgccgacgttcaagtttgagctggaaaagagcaagggcaaagtcattggggggagttcgggaaaagaagcaaccgttgtccagttacctatctccaaaggcattgctggtgtgagcatggtacttgaaccgggtgcgatgcgcgaattgcactggcatgccacagcagcagagtgggggttcgtattatggggccacgtccgtacgacggtgatcgatccacaaggtctggccgaaaccaacgactttggaccgggcgacgtgtggtattttcctcgcggtcatgggcacatgctggaatgcctgggcgataaaccggcgcatttcattctgatcttcgataacggctacttctcagagtttggcaccttctctattactgactggatcggtcacacaccgaaagcgcttctcgccaagaactttaagctgcccgaaagcgcttttgatgggtttcccaaaaaagaggtctattttgcacgtggcgcggttccaccagccacccctgcagcgcctttacagggactgaagctgccaccactcacgcataaatacgaactcctcgaacaagaacctcataaagtttttaaaggtggtcgtgaatggcgcgtggatagcactcgttttcccatttccaagactgtaaccggcgttgttcttgatttggaacccggcgcgttacgcgagcttcactggcatcctaatgctgacgagtggcaatatgtgatcgatggcaacattagtgtgacgatgttcggttctcatggccgttggcgcaccgaacagatggagaagggtgatgtcgggtatattccacaggggtatggccacagcatcgaaaatgttggagatcgtccttgtcgcgtcttgattggctttaacacaggtaactaccaagcgatcgacttatcacagtggattgcaggtaatcccgcggatgttcttgccacgaacttctccaaacccaccagcctctttgaaaagttcccaaaacaggacgtgtttattgctcctggcaag

SEQ ID NO: 1128 - protein, 359 aa, synthetic construct
  REGION 1..359: note = Variant of oxalate decarboxylase from Gemmata sp. SH-PL17
MGDPTFMNNVPDPLLSGKDLPTFKFELEKSKGKVIGGSSGKEATVVQLPISKGIAGVSMVLEPGAMRELHWHATAAEWGFVLWGHVRTTVIDPQGLAETNDFGPGDVWYFPRGHGHMLECLGDKPAHFILIFDNGYFSEFGTFSITDWIGHTPKALLAKNFKLPESAFDGFPKKEVYFARGAVPPATPAAPLQGLKLPPLTHKYELLEQEPHKVFKGGREWRVDSTRFPISKTVTGVVLDLEPGALRELHWHPNADEWQYVIDGNISVTMFGSHGRWRTEQMEKGDVGYIPQGYGHSIENVGDRPCRVLIGFNTGNYQAIDLSQWIAGNPADVLATNFSKPTSLFEKFPKQDVFIAPGK

SEQ ID NO: 1129 - DNA, 1077 bp, synthetic construct
  misc_feature 1..1077: note = Variant of oxalate decarboxylase from Gemmata sp. SH-PL17
  source 1..1077: mol_type = other DNA
atgggtgaccctacctttatgaacaatgtaccagaccctctgctgtcgggcaaagatttgccgacgttcaagtttgagctggaaaagagcaagggcaaagtcattggggggagttcgggaaaagaagcaaccgttgtccagttacctatctccaaaggcattgctggtgtgagcatgatgcttgaaccgggtgcgatgcgcgaattgcactggcatgccacagcagcagagtgggggttcgtattatggggccacgtccgtacgacggtgatcgatccacaaggtctggccgaaaccaacgactttggaccgggcgacgtgtggtattttcctcgcggtcatgggcacatgctggaatgcctgggcgataaaccggcgcatttcattctgatcttcgataacggctacttctcagagtttggcaccttctctattactgactggatcggtcacacaccgaaagcgcttctcgccaagaactttaagctgcccgaaagcgcttttgatgggtttcccaaaaaagaggtctattttgcacgtggcgcggttccaccagccacccctgcagcgcctttacagggactgaagctgccaccactcacgcataaatacgaactcctcgaacaagaacctcataaagtttttaaaggtggtcgtgaatggcgcgtggatagcactcgttttcccatttccaagactgtaaccggcgttgttcttgatttggaacccggcgcgttacgcgagcttcactggcatcctaatgctgacgagtggcaatatgtgatcgatggcaacattagtgtgacgatgttcggttctcatggccgtgtacgcaccgaacagatggagaagggtgatgtcgggtatattccacaggggtatggccacagcatcgaaaatgttggagatcgtccttgtcgcgtcttgattggctttaacacaggtaactaccaagcgatcgacttatcacagtggattgcaggtaatcccgcggatgttcttgccacgaacttctccaaacccaccagcctctttgaaaagttcccaaaacaggacgtgtttattgctcctggcaag

SEQ ID NO: 1130 - protein, 359 aa, synthetic construct
  REGION 1..359: note = Variant of oxalate decarboxylase from Gemmata sp. SH-PL17
MGDPTFMNNVPDPLLSGKDLPTFKFELEKSKGKVIGGSSGKEATVVQLPISKGIAGVSMMLEPGAMRELHWHATAAEWGFVLWGHVRTTVIDPQGLAETNDFGPGDVWYFPRGHGHMLECLGDKPAHFILIFDNGYFSEFGTFSITDWIGHTPKALLAKNFKLPESAFDGFPKKEVYFARGAVPPATPAAPLQGLKLPPLTHKYELLEQEPHKVFKGGREWRVDSTRFPISKTVTGVVLDLEPGALRELHWHPNADEWQYVIDGNISVTMFGSHGRVRTEQMEKGDVGYIPQGYGHSIENVGDRPCRVLIGFNTGNYQAIDLSQWIAGNPADVLATNFSKPTSLFEKFPKQDVFIAPGK

SEQ ID NO: 1131 - DNA, 1077 bp, synthetic construct
  misc_feature 1..1077: note = Variant of oxalate decarboxylase from Gemmata sp. SH-PL17
  source 1..1077: mol_type = other DNA
atgggtgaccctacctttatgaacaatgtaccagaccctctgctgtcggctaaagatttgccgacgttcaagtttgagctggaaaagagcaagggcaaagtcattggggggagttcgggaaaagaagcaaccgttgtccagttacctatctccaaaggcattgctggtgtgagcatggtacttgaaccgggtgcgatgcgcgaattgcactggcatgccacagcagcagagtgggggttcgtattatggggccacgtccgtacgacggtgatcgatccacaaggtctggccgaaaccaacgactttggaccgggcgacgtgtggtattttcctcgcggtcatgggcacatgctggaatgcctgggcgataaaccggcgcatttcattctgatcttcgataacggctacttctcagagtttggcaccttctctattactgactggatcggtcacacaccgaaagcgcttctcgccaagaactttaagctgcccgaaagcgcttttgatgggtttcccaaaaaagaggtctattttgcacgtggcgcggttccaccagccacccctgcagcgcctttacagggactgaagctgccaccactcacgcataaatacgaactcctcgaacaagaacctcataaagtttttaaaggtggtcgtgaatggcgcgtggatagcactcgttttcccatttccaagactgtaaccggcgttgttcttgatttggaacccggcgcgttacgcgagcttcactggcatcctaatgctgacgagtggcaatatgtgatcgatggcaacattagtgtgacgatgttcggttctcatggccgtgtacgcaccgaacagatggagaagggtgatgtcgggtatattccacaggggtatggccacagcatcgaaaatgttggagatcgtccttgtcgcgtcttgattggctttaacacaggtaactaccaagcgatcgacttatcacagtggattgcaggtaatcccgcggatgttcttgccacgaacttctccaaacccaccagcctctttgaaaagttcccaaaacaggacgtgtttattgctcctggcaag

SEQ ID NO: 1132 - protein, 359 aa, synthetic construct
  REGION 1..359: note = Variant of oxalate decarboxylase from Gemmata sp. SH-PL17
MGDPTFMNNVPDPLLSAKDLPTFKFELEKSKGKVIGGSSGKEATVVQLPISKGIAGVSMVLEPGAMRELHWHATAAEWGFVLWGHVRTTVIDPQGLAETNDFGPGDVWYFPRGHGHMLECLGDKPAHFILIFDNGYFSEFGTFSITDWIGHTPKALLAKNFKLPESAFDGFPKKEVYFARGAVPPATPAAPLQGLKLPPLTHKYELLEQEPHKVFKGGREWRVDSTRFPISKTVTGVVLDLEPGALRELHWHPNADEWQYVIDGNISVTMFGSHGRVRTEQMEKGDVGYIPQGYGHSIENVGDRPCRVLIGFNTGNYQAIDLSQWIAGNPADVLATNFSKPTSLFEKFPKQDVFIAPGK

SEQ ID NO: 1133 - DNA, 1077 bp, synthetic construct
  misc_feature 1..1077: note = Variant of oxalate decarboxylase from Gemmata sp. SH-PL17
  source 1..1077: mol_type = other DNA
atgggtgaccctacctttatgaacaatgtaccagaccctctgctgtcgggcaaagatttgccgacgttcaagtttgagctggaaaagagcaagggcaaagtcattggggggagttcgggaaaagaagcaaccgttgtccagttacctatctccaaaggcattgctggtgtgagcatggtacttgaaccgggtgcgatgcgcgaattgcactggcatgccacagcagcagagtgggggttcgtattatggggccacgtccgtacgacggtgatcgatccacaaggtctggccgaaaccaacgactttggaccgggcgacgtgtggtattttcctcgcggtcatgggcacatgctggaatgcctgggcgataaaccggcgcatttcattctgatcttcgataacggctacttctcagagtttggcaccttctctattactgactggatcggtcacacaccgaaagcgcttctcgccaagaactttaagctgcccgaaagcgcttttgatgggtttcccaaaaaagaggtctattttgcacgtggcgcggttccaccagccacccctgcagcgcctttacagggactgaagctgccaccactcacgcataaatacgaactcctcgaacaagaacctcataaagtttttaaaggtggtcgtgaatggcgcgtggatagcactcgttttcccatttccaagactgtaaccggcgttgttcttgatttggaacccggcgcgttacgcgagcttcactggcatcctaatgctgacgagtggcaatatgtgatcgatggcaacattagtgtgacgatgttcggttctcatggccgtgtacgcaccgaacagatggagaagggtgatgtcgggtatattccacaggggtatggccacagcatcgaaaatgttggagatcgtccttgtcgcgtcttgattggctttaacacaggtaactacgcggcgatcgacttatcacagtggattgcaggtaatcccgcggatgttcttgccacgaacttctccaaacccaccagcctctttgaaaagttcccaaaacaggacgtgtttattgctcctggcaag

SEQ ID NO: 1134 - protein, 359 aa, synthetic construct
  REGION 1..359: note = Variant of oxalate decarboxylase from Gemmata sp. SH-PL17
MGDPTFMNNVPDPLLSGKDLPTFKFELEKSKGKVIGGSSGKEATVVQLPISKGIAGVSMVLEPGAMRELHWHATAAEWGFVLWGHVRTTVIDPQGLAETNDFGPGDVWYFPRGHGHMLECLGDKPAHFILIFDNGYFSEFGTFSITDWIGHTPKALLAKNFKLPESAFDGFPKKEVYFARGAVPPATPAAPLQGLKLPPLTHKYELLEQEPHKVFKGGREWRVDSTRFPISKTVTGVVLDLEPGALRELHWHPNADEWQYVIDGNISVTMFGSHGRVRTEQMEKGDVGYIPQGYGHSIENVGDRPCRVLIGFNTGNYAAIDLSQWIAGNPADVLATNFSKPTSLFEKFPKQDVFIAPGK

SEQ ID NO: 1135 - DNA, 1077 bp, synthetic construct
  misc_feature 1..1077: note = Variant of oxalate decarboxylase from Gemmata sp. SH-PL17
  source 1..1077: mol_type = other DNA
atgggtgaccctacctttatgaacaatgtaccagaccctctgctgtcgggcaaagatttgccgacgttcaagtttgagctggaaaagagcaagggcaaagtcattggggggagttcgggaaaagaagcaaccgttgtccagttacctatctccaaaggcattgctggtgtgagcatggtacttgaaccgggtgcgatgcgcgaattgcactggcatgccacagcagcagagtgggggttcgtattatggggccacgtccgtacgacggtgatcgatccacaaggtctggccgaaaccaacgactttggaccgggcgacgtgtggtattttcctcgcggtcatgggcacatgctggaatgcctgggcgataaaccggcgcatttcattctgatcttcgataacggctacttctcagagtttggcaccttctctattactgactggatcggtcacacaccgaaagcgcttctcgccaagaactttaagctgcccgaaagcgcttttgatgggtttcccaaacatgaggtctattttgcacgtggcgcggttccaccagccacccctgcagcgcctttacagggactgaagctgccaccactcacgcataaatacgaactcctcgaacaagaacctcataaagtttttaaaggtggtcgtgaatggcgcgtggatagcactcgttttcccatttccaagactgtaaccggcgttgttcttgatttggaacccggcgcgttacgcgagcttcactggcatcctaatgctgacgagtggcaatatgtgatcgatggcaacattagtgtgacgatgttcggttctcatggccgtgtacgcaccgaacagatggagaagggtgatgtcgggtatattccacaggggtatggccacagcatcgaaaatgttggagatcgtccttgtcgcgtcttgattggctttaacacaggtaactaccaagcgatcgacttatcacagtggattgcaggtaatcccgcggatgttcttgccacgaacttctccaaacccaccagcctctttgaaaagttcccaaaacaggacgtgtttattgctcctggcaag

SEQ ID NO: 1136 - protein, 359 aa, synthetic construct
  REGION 1..359: note = Variant of oxalate decarboxylase from Gemmata sp. SH-PL17
MGDPTFMNNVPDPLLSGKDLPTFKFELEKSKGKVIGGSSGKEATVVQLPISKGIAGVSMVLEPGAMRELHWHATAAEWGFVLWGHVRTTVIDPQGLAETNDFGPGDVWYFPRGHGHMLECLGDKPAHFILIFDNGYFSEFGTFSITDWIGHTPKALLAKNFKLPESAFDGFPKHEVYFARGAVPPATPAAPLQGLKLPPLTHKYELLEQEPHKVFKGGREWRVDSTRFPISKTVTGVVLDLEPGALRELHWHPNADEWQYVIDGNISVTMFGSHGRVRTEQMEKGDVGYIPQGYGHSIENVGDRPCRVLIGFNTGNYQAIDLSQWIAGNPADVLATNFSKPTSLFEKFPKQDVFIAPGK

SEQ ID NO: 1137 - DNA, 1077 bp, synthetic construct
  misc_feature 1..1077: note = Variant of oxalate decarboxylase from Gemmata sp. SH-PL17
  source 1..1077: mol_type = other DNA
atgggtgaccctacctttatgaacaatgtaccagaccctctgctgtcgggcaaagatttgccgacgttcaagtttgagctggaaaagagcaagggcaaagtcattggggggagttcgggaaaagaagcaaccgttgtccagttacctatctccaaaggcattgctggtgtgagcatggtacttgaaccgggtgcgatgcgcgaattgcactggcatgccacagcagcagagtgggggttcgtattatcgggccacgtccgtacgacggtgatcgatccacaaggtctggccgaaaccaacgactttggaccgggcgacgtgtggtattttcctcgcggtcatgggcacatgctggaatgcctgggcgataaaccggcgcatttcattctgatcttcgataacggctacttctcagagtttggcaccttctctattactgactggatcggtcacacaccgaaagcgcttctcgccaagaactttaagctgcccgaaagcgcttttgatgggtttcccaaaaaagaggtctattttgcacgtggcgcggttccaccagccacccctgcagcgcctttacagggactgaagctgccaccactcacgcataaatacgaactcctcgaacaagaacctcataaagtttttaaaggtggtcgtgaatggcgcgtggatagcactcgttttcccatttccaagactgtaaccggcgttgttcttgatttggaacccggcgcgttacgcgagcttcactggcatcctaatgctgacgagtggcaatatgtgatcgatggcaacattagtgtgacgatgttcggttctcatggccgtgtacgcaccgaacagatggagaagggtgatgtcgggtatattccacaggggtatggccacagcatcgaaaatgttggagatcgtccttgtcgcgtcttgattggctttaacacaggtaactaccaagcgatcgacttatcacagtggattgcaggtaatcccgcggatgttcttgccacgaacttctccaaacccaccagcctctttgaaaagttcccaaaacaggacgtgtttattgctcctggcaag

SEQ ID NO: 1138 - protein, 359 aa, synthetic construct
  REGION 1..359: note = Variant of oxalate decarboxylase from Gemmata sp. SH-PL17
MGDPTFMNNVPDPLLSGKDLPTFKFELEKSKGKVIGGSSGKEATVVQLPISKGIAGVSMVLEPGAMRELHWHATAAEWGFVLSGHVRTTVIDPQGLAETNDFGPGDVWYFPRGHGHMLECLGDKPAHFILIFDNGYFSEFGTFSITDWIGHTPKALLAKNFKLPESAFDGFPKKEVYFARGAVPPATPAAPLQGLKLPPLTHKYELLEQEPHKVFKGGREWRVDSTRFPISKTVTGVVLDLEPGALRELHWHPNADEWQYVIDGNISVTMFGSHGRVRTEQMEKGDVGYIPQGYGHSIENVGDRPCRVLIGFNTGNYQAIDLSQWIAGNPADVLATNFSKPTSLFEKFPKQDVFIAPGK

SEQ ID NO: 1139 - DNA, 1077 bp, synthetic construct
  misc_feature 1..1077: note = Variant of oxalate decarboxylase from Gemmata sp. SH-PL17
  source 1..1077: mol_type = other DNA
atgggtgaccctacctttatgaacaatgtaccagaccctctgctgtcgggcaaagatttgccgacgttcaagtttgagctggaaaagagcaagggcaaagtcattggggggagttcgggaaaagaagcaaccgttgtccagttacctatctccaaaggcattgctggtgtgagcatggtacttgaaccgggtgcgatgcgcgaattgcactggcatgccacagcagcagagtgggggttcgtattatggggccacgtccgtacgacggtgatcgatccacaaggtctggccgaaaccaacgactttggaccgggcgacgtgtggtattttcctcgcggtcatgggcacatgctggaatgcctgggcgataaaccggcgcatttcattctgatcttcgataacggctacttctcagagtttggcaccttctctattactgactggatcggtcacacaccgaaagcgcttctcgccaagaactttaagctgcccgaaagcgcttttgatgggtttcccaaaaaagaggtctattttgcacgtggcgcggttccaccagccacccctgcagcgcctttacagggactgaagctgccaccactcacgcataaatacgaactcctcgaacaagaacctcataaagtttttaaaggtggtcgtgaatggcgcgtggatagcactcgttttcccatttccaagactgtaaccggcgttgttcttgatttggaacccggcgcgttacgcgagcttcactggcatcctaatgctgacgagtggcaatatgtgatcgatggcaacattagtgtgacgatgttcggttctcatggccgtattcgcaccgaacagatggagaagggtgatgtcgggtatattccacaggggtatggccacagcatcgaaaatgttggagatcgtccttgtcgcgtcttgattggctttaacacaggtaactaccaagcgatcgacttatcacagtggattgcaggtaatcccgcggatgttcttgccacgaacttctccaaacccaccagcctctttgaaaagttcccaaaacaggacgtgtttattgctcctggcaag

SEQ ID NO: 1140 - protein, 359 aa, synthetic construct
  REGION 1..359: note = Variant of oxalate decarboxylase from Gemmata sp. SH-PL17
MGDPTFMNNVPDPLLSGKDLPTFKFELEKSKGKVIGGSSGKEATVVQLPISKGIAGVSMVLEPGAMRELHWHATAAEWGFVLWGHVRTTVIDPQGLAETNDFGPGDVWYFPRGHGHMLECLGDKPAHFILIFDNGYFSEFGTFSITDWIGHTPKALLAKNFKLPESAFDGFPKKEVYFARGAVPPATPAAPLQGLKLPPLTHKYELLEQEPHKVFKGGREWRVDSTRFPISKTVTGVVLDLEPGALRELHWHPNADEWQYVIDGNISVTMFGSHGRIRTEQMEKGDVGYIPQGYGHSIENVGDRPCRVLIGFNTGNYQAIDLSQWIAGNPADVLATNFSKPTSLFEKFPKQDVFIAPGK

SEQ ID NO: 1141 - DNA, 1077 bp, synthetic construct
  misc_feature 1..1077: note = Variant of oxalate decarboxylase from Gemmata sp. SH-PL17
  source 1..1077: mol_type = other DNA
atgggtgaccctacctttatgaacaatgtaccagacgagctgctgtcgggcaaagatttgccgacgttcaagtttgagctggaaaagagcaagggcaaagtcattggggggagttcgggaaaagaagcaaccgttgtccagttacctatctccaaaggcattgctggtgtgagcatggtacttgaaccgggtgcgatgcgcgaattgcactggcatgccacagcagcagagtgggggttcgtattatggggccacgtccgtacgacggtgatcgatccacaaggtctggccgaaaccaacgactttggaccgggcgacgtgtggtattttcctcgcggtcatgggcacatgctggaatgcctgggcgataaaccggcgcatttcattctgatcttcgataacggctacttctcagagtttggcaccttctctattactgactggatcggtcacacaccgaaagcgcttctcgccaagaactttaagctgcccgaaagcgcttttgatgggtttcccaaaaaagaggtctattttgcacgtggcgcggttccaccagccacccctgcagcgcctttacagggactgaagctgccaccactcacgcataaatacgaactcctcgaacaagaacctcataaagtttttaaaggtggtcgtgaatggcgcgtggatagcactcgttttcccatttccaagactgtaaccggcgttgttcttgatttggaacccggcgcgttacgcgagcttcactggcatcctaatgctgacgagtggcaatatgtgatcgatggcaacattagtgtgacgatgttcggttctcatggccgtgtacgcaccgaacagatggagaagggtgatgtcgggtatattccacaggggtatggccacagcatcgaaaatgttggagatcgtccttgtcgcgtcttgattggctttaacacaggtaactaccaagcgatcgacttatcacagtggattgcaggtaatcccgcggatgttcttgccacgaacttctccaaacccaccagcctctttgaaaagttcccaaaacaggacgtgtttattgctcctggcaag

SEQ ID NO: 1142 - protein, 359 aa, synthetic construct
  REGION 1..359: note = Variant of oxalate decarboxylase from Gemmata sp. SH-PL17
MGDPTFMNNVPDELLSGKDLPTFKFELEKSKGKVIGGSSGKEATVVQLPISKGIAGVSMVLEPGAMRELHWHATAAEWGFVLWGHVRTTVIDPQGLAETNDFGPGDVWYFPRGHGHMLECLGDKPAHFILIFDNGYFSEFGTFSITDWIGHTPKALLAKNFKLPESAFDGFPKKEVYFARGAVPPATPAAPLQGLKLPPLTHKYELLEQEPHKVFKGGREWRVDSTRFPISKTVTGVVLDLEPGALRELHWHPNADEWQYVIDGNISVTMFGSHGRVRTEQMEKGDVGYIPQGYGHSIENVGDRPCRVLIGFNTGNYQAIDLSQWIAGNPADVLATNFSKPTSLFEKFPKQDVFIAPGK

SEQ ID NO: 1143 - DNA, 1077 bp, synthetic construct
  misc_feature 1..1077: note = Variant of oxalate decarboxylase from Gemmata sp. SH-PL17
  source 1..1077: mol_type = other DNA
atgggtgaccctacctttatgaacaatgtaccagaccctctgctgtcgaagaaagatttgccgacgttcaagtttgagctggaaaagagcaagggcaaagtcattggggggagttcgggaaaagaagcaaccgttgtccagttacctatctccaaaggcattgctggtgtgagcatggtacttgaaccgggtgcgatgcgcgaattgcactggcatgccacagcagcagagtgggggttcgtattatggggccacgtccgtacgacggtgatcgatccacaaggtctggccgaaaccaacgactttggaccgggcgacgtgtggtattttcctcgcggtcatgggcacatgctggaatgcctgggcgataaaccggcgcatttcattctgatcttcgataacggctacttctcagagtttggcaccttctctattactgactggatcggtcacacaccgaaagcgcttctcgccaagaactttaagctgcccgaaagcgcttttgatgggtttcccaaaaaagaggtctattttgcacgtggcgcggttccaccagccacccctgcagcgcctttacagggactgaagctgccaccactcacgcataaatacgaactcctcgaacaagaacctcataaagtttttaaaggtggtcgtgaatggcgcgtggatagcactcgttttcccatttccaagactgtaaccggcgttgttcttgatttggaacccggcgcgttacgcgagcttcactggcatcctaatgctgacgagtggcaatatgtgatcgatggcaacattagtgtgacgatgttcggttctcatggccgtgtacgcaccgaacagatggagaagggtgatgtcgggtatattccacaggggtatggccacagcatcgaaaatgttggagatcgtccttgtcgcgtcttgattggctttaacacaggtaactaccaagcgatcgacttatcacagtggattgcaggtaatcccgcggatgttcttgccacgaacttctccaaacccaccagcctctttgaaaagttcccaaaacaggacgtgtttattgctcctggcaag

SEQ ID NO: 1144 - protein, 359 aa, synthetic construct
  REGION 1..359: note = Variant of oxalate decarboxylase from Gemmata sp. SH-PL17
MGDPTFMNNVPDPLLSKKDLPTFKFELEKSKGKVIGGSSGKEATVVQLPISKGIAGVSMVLEPGAMRELHWHATAAEWGFVLWGHVRTTVIDPQGLAETNDFGPGDVWYFPRGHGHMLECLGDKPAHFILIFDNGYFSEFGTFSITDWIGHTPKALLAKNFKLPESAFDGFPKKEVYFARGAVPPATPAAPLQGLKLPPLTHKYELLEQEPHKVFKGGREWRVDSTRFPISKTVTGVVLDLEPGALRELHWHPNADEWQYVIDGNISVTMFGSHGRVRTEQMEKGDVGYIPQGYGHSIENVGDRPCRVLIGFNTGNYQAIDLSQWIAGNPADVLATNFSKPTSLFEKFPKQDVFIAPGK

SEQ ID NO: 1145 - DNA, 1077 bp, synthetic construct
  misc_feature 1..1077: note = Variant of oxalate decarboxylase from Gemmata sp. SH-PL17
  source 1..1077: mol_type = other DNA
atgggtgaccctacctttatgaacaatgtaccagaccctctgctgtcgggcaaagatttgccgacgttcaagtttaagctggaaaagagcaagggcaaagtcattggggggagttcgggaaaagaagcaaccgttgtccagttacctatctccaaaggcattgctggtgtgagcatggtacttgaaccgggtgcgatgcgcgaattgcactggcatgccacagcagcagagtgggggttcgtattatggggccacgtccgtacgacggtgatcgatccacaaggtctggccgaaaccaacgactttggaccgggcgacgtgtggtattttcctcgcggtcatgggcacatgctggaatgcctgggcgataaaccggcgcatttcattctgatcttcgataacggctacttctcagagtttggcaccttctctattactgactggatcggtcacacaccgaaagcgcttctcgccaagaactttaagctgcccgaaagcgcttttgatgggtttcccaaaaaagaggtctattttgcacgtggcgcggttccaccagccacccctgcagcgcctttacagggactgaagctgccaccactcacgcataaatacgaactcctcgaacaagaacctcataaagtttttaaaggtggtcgtgaatggcgcgtggatagcactcgttttcccatttccaagactgtaaccggcgttgttcttgatttggaacccggcgcgttacgcgagcttcactggcatcctaatgctgacgagtggcaatatgtgatcgatggcaacattagtgtgacgatgttcggttctcatggccgtgtacgcaccgaacagatggagaagggtgatgtcgggtatattccacaggggtatggccacagcatcgaaaatgttggagatcgtccttgtcgcgtcttgattggctttaacacaggtaactaccaagcgatcgacttatcacagtggattgcaggtaatcccgcggatgttcttgccacgaacttctccaaacccaccagcctctttgaaaagttcccaaaacaggacgtgtttattgctcctggcaag

SEQ ID NO: 1146 - protein, 359 aa, synthetic construct
  REGION 1..359: note = Variant of oxalate decarboxylase from Gemmata sp. SH-PL17
MGDPTFMNNVPDPLLSGKDLPTFKFKLEKSKGKVIGGSSGKEATVVQLPISKGIAGVSMVLEPGAMRELHWHATAAEWGFVLWGHVRTTVIDPQGLAETNDFGPGDVWYFPRGHGHMLECLGDKPAHFILIFDNGYFSEFGTFSITDWIGHTPKALLAKNFKLPESAFDGFPKKEVYFARGAVPPATPAAPLQGLKLPPLTHKYELLEQEPHKVFKGGREWRVDSTRFPISKTVTGVVLDLEPGALRELHWHPNADEWQYVIDGNISVTMFGSHGRVRTEQMEKGDVGYIPQGYGHSIENVGDRPCRVLIGFNTGNYQAIDLSQWIAGNPADVLATNFSKPTSLFEKFPKQDVFIAPGK

SEQ ID NO: 1147 - DNA, 1077 bp, synthetic construct
  misc_feature 1..1077: note = Variant of oxalate decarboxylase from Gemmata sp. SH-PL17
  source 1..1077: mol_type = other DNA
atgggtgaccctacctttatgaacaatgtaccagaccctctgctgtcgggcaaagatttgccgacgttcaagtttgagctggaaaagagcaagggcaaagtcattggggggagttcgggaaaagaagcaaccgttgtccagttacctatctccaaaggcattgctggtgtgagcatggtacttgaaccgggtgcgatgcgcgaattgcactggcatgccacagcagcagagtgggggttcgtattatggggccacgtccgtacgacggtgatcgatccacaaggtgcggccgaaaccaacgactttggaccgggcgacgtgtggtattttcctcgcggtcatgggcacatgctggaatgcctgggcgataaaccggcgcatttcattctgatcttcgataacggctacttctcagagtttggcaccttctctattactgactggatcggtcacacaccgaaagcgcttctcgccaagaactttaagctgcccgaaagcgcttttgatgggtttcccaaaaaagaggtctattttgcacgtggcgcggttccaccagccacccctgcagcgcctttacagggactgaagctgccaccactcacgcataaatacgaactcctcgaacaagaacctcataaagtttttaaaggtggtcgtgaatggcgcgtggatagcactcgttttcccatttccaagactgtaaccggcgttgttcttgatttggaacccggcgcgttacgcgagcttcactggcatcctaatgctgacgagtggcaatatgtgatcgatggcaacattagtgtgacgatgttcggttctcatggccgtgtacgcaccgaacagatggagaagggtgatgtcgggtatattccacaggggtatggccacagcatcgaaaatgttggagatcgtccttgtcgcgtcttgattggctttaacacaggtaactaccaagcgatcgacttatcacagtggattgcaggtaatcccgcggatgttcttgccacgaacttctccaaacccaccagcctctttgaaaagttcccaaaacaggacgtgtttattgctcctggcaag

SEQ ID NO: 1148 - protein, 359 aa, synthetic construct; identical to SEQ ID NO: 908
  REGION 1..359: note = Variant of oxalate decarboxylase from Gemmata sp. SH-PL17

SEQ ID NO: 1149 - DNA, 1077 bp, synthetic construct
  misc_feature 1..1077: note = Variant of oxalate decarboxylase from Gemmata sp. SH-PL17
  source 1..1077: mol_type = other DNA
atgggtgaccctacctttatgaacaatgtaccagaccctctgctgtcgggcaaagatttgccgacgttcaagtttgagctggaaaagagcaagggcaaagtcattggggggagttcgggaaaagaagcaaccgttgtccagttacctatctccaaaggcattgctggtgtgagcatggtacttgaaccgggtgcgatgcgcgaattgcactggcatgccacagcagcagagtgggggttcgtattatggggccacgtccgtacgacggtgatcgatccacaaggtctggccgaaaccaacgactttggaccgggcgacgtgtggtattttcctcgcggtcatgggcacatgctggaatgcctgggcgataaaccggcgcatttcattctgatcttcgataacggctacttctcagagtttggcaccttctctattactgactggatcggtcacacaccgaaagcgcttctcgccaagaactttaagctgcccgaaagcgcttttgatgggtttcccaaagatgaggtctattttgcacgtggcgcggttccaccagccacccctgcagcgcctttacagggactgaagctgccaccactcacgcataaatacgaactcctcgaacaagaacctcataaagtttttaaaggtggtcgtgaatggcgcgtggatagcactcgttttcccatttccaagactgtaaccggcgttgttcttgatttggaacccggcgcgttacgcgagcttcactggcatcctaatgctgacgagtggcaatatgtgatcgatggcaacattagtgtgacgatgttcggttctcatggccgtgtacgcaccgaacagatggagaagggtgatgtcgggtatattccacaggggtatggccacagcatcgaaaatgttggagatcgtccttgtcgcgtcttgattggctttaacacaggtaactaccaagcgatcgacttatcacagtggattgcaggtaatcccgcggatgttcttgccacgaacttctccaaacccaccagcctctttgaaaagttcccaaaacaggacgtgtttattgctcctggcaag

SEQ ID NO: 1150 - protein, 359 aa, synthetic construct
  REGION 1..359: note = Variant of oxalate decarboxylase from Gemmata sp. SH-PL17
MGDPTFMNNVPDPLLSGKDLPTFKFELEKSKGKVIGGSSGKEATVVQLPISKGIAGVSMVLEPGAMRELHWHATAAEWGFVLWGHVRTTVIDPQGLAETNDFGPGDVWYFPRGHGHMLECLGDKPAHFILIFDNGYFSEFGTFSITDWIGHTPKALLAKNFKLPESAFDGFPKDEVYFARGAVPPATPAAPLQGLKLPPLTHKYELLEQEPHKVFKGGREWRVDSTRFPISKTVTGVVLDLEPGALRELHWHPNADEWQYVIDGNISVTMFGSHGRVRTEQMEKGDVGYIPQGYGHSIENVGDRPCRVLIGFNTGNYQAIDLSQWIAGNPADVLATNFSKPTSLFEKFPKQDVFIAPGK

SEQ ID NO: 1151 - DNA, 1077 bp, synthetic construct
  misc_feature 1..1077: note = Variant of oxalate decarboxylase from Gemmata sp. SH-PL17
  source 1..1077: mol_type = other DNA
atgggtgaccctacctttatgaacaatgtaccagaccctctgctgtcgggcaaagatttgccgacgttcaagtttgagctggaaaagagcaagggcaaagtcattggggggagttcgggaaaagaagcaaccgttgtccagttacctatctccaaaggcattgctggtgtgagcatggtacttgaaccgggtgcgatgcgcgaattgcactggcatgccacagcagcagagtgggggttcgtattatggggccacgtccgtacgacggtgatcgatccacaaggtctggccgaaaccaacgactttggaccgggcgacgtgtggtattttcctcgcggtcatgggcacatgctggaatgcctgggcgataaaccggcgcatttcattctgatcttcgataacggctacttctcagagtttggcaccttctctattactgactggatcggtcacacaccgaaagcgcttctcgccaagaactttaagctgcccgaaagcgcttttgatgggtttcccaaaaaagaggtctattttgcacgtggcgcggttccaccagccacccctgcagcgcctttacagggactgaagctgccaccactcacgcataaatacgaactcctcgaacaagtgcctcataaagtttttaaaggtggtcgtgaatggcgcgtggatagcactcgttttcccatttccaagactgtaaccggcgttgttcttgatttggaacccggcgcgttacgcgagcttcactggcatcctaatgctgacgagtggcaatatgtgatcgatggcaacattagtgtgacgatgttcggttctcatggccgtgtacgcaccgaacagatggagaagggtgatgtcgggtatattccacaggggtatggccacagcatcgaaaatgttggagatcgtccttgtcgcgtcttgattggctttaacacaggtaactaccaagcgatcgacttatcacagtggattgcaggtaatcccgcggatgttcttgccacgaacttctccaaacccaccagcctctttgaaaagttcccaaaacaggacgtgtttattgctcctggcaag

SEQ ID NO: 1152 - protein, 359 aa, synthetic construct
  REGION 1..359: note = Variant of oxalate decarboxylase from Gemmata sp. SH-PL17
MGDPTFMNNVPDPLLSGKDLPTFKFELEKSKGKVIGGSSGKEATVVQLPISKGIAGVSMVLEPGAMRELHWHATAAEWGFVLWGHVRTTVIDPQGLAETNDFGPGDVWYFPRGHGHMLECLGDKPAHFILIFDNGYFSEFGTFSITDWIGHTPKALLAKNFKLPESAFDGFPKKEVYFARGAVPPATPAAPLQGLKLPPLTHKYELLEQVPHKVFKGGREWRVDSTRFPISKTVTGVVLDLEPGALRELHWHPNADEWQYVIDGNISVTMFGSHGRVRTEQMEKGDVGYIPQGYGHSIENVGDRPCRVLIGFNTGNYQAIDLSQWIAGNPADVLATNFSKPTSLFEKFPKQDVFIAPGK

SEQ ID NO: 1153 - DNA, 1077 bp, synthetic construct
  misc_feature 1..1077: note = Variant of oxalate decarboxylase from Gemmata sp. SH-PL17
  source 1..1077: mol_type = other DNA
atgggtgaccctacctttatgaacaatgtaccagaccctctgctgtcgggcaaagatttgccgacgttcaagtttgagctggaaaagagctcgggcaaagtcattggggggagttcgggaaaagaagcaaccgttgtccagttacctatctccaaaggcattgctggtgtgagcatggtacttgaaccgggtgcgatgcgcgaattgcactggcatgccacagcagcagagtgggggttcgtattatggggccacgtccgtacgacggtgatcgatccacaaggtctggccgaaaccaacgactttggaccgggcgacgtgtggtattttcctcgcggtcatgggcacatgctggaatgcctgggcgataaaccggcgcatttcattctgatcttcgataacggctacttctcagagtttggcaccttctctattactgactggatcggtcacacaccgaaagcgcttctcgccaagaactttaagctgcccgaaagcgcttttgatgggtttcccaaaaaagaggtctattttgcacgtggcgcggttccaccagccacccctgcagcgcctttacagggactgaagctgccaccactcacgcataaatacgaactcctcgaacaagaacctcataaagtttttaaaggtggtcgtgaatggcgcgtggatagcactcgttttcccatttccaagactgtaaccggcgttgttcttgatttggaacccggcgcgttacgcgagcttcactggcatcctaatgctgacgagtggcaatatgtgatcgatggcaacattagtgtgacgatgttcggttctcatggccgtgtacgcaccgaacagatggagaagggtgatgtcgggtatattccacaggggtatggccacagcatcgaaaatgttggagatcgtccttgtcgcgtcttgattggctttaacacaggtaactaccaagcgatcgacttatcacagtggattgcaggtaatcccgcggatgttcttgccacgaacttctccaaacccaccagcctctttgaaaagttcccaaaacaggacgtgtttattgctcctggcaag

SEQ ID NO: 1154 - protein, 359 aa, synthetic construct
  REGION 1..359: note = Variant of oxalate decarboxylase from Gemmata sp. SH-PL17
MGDPTFMNNVPDPLLSGKDLPTFKFELEKSSGKVIGGSSGKEATVVQLPISKGIAGVSMVLEPGAMRELHWHATAAEWGFVLWGHVRTTVIDPQGLAETNDFGPGDVWYFPRGHGHMLECLGDKPAHFILIFDNGYFSEFGTFSITDWIGHTPKALLAKNFKLPESAFDGFPKKEVYFARGAVPPATPAAPLQGLKLPPLTHKYELLEQEPHKVFKGGREWRVDSTRFPISKTVTGVVLDLEPGALRELHWHPNADEWQYVIDGNISVTMFGSHGRVRTEQMEKGDVGYIPQGYGHSIENVGDRPCRVLIGFNTGNYQAIDLSQWIAGNPADVLATNFSKPTSLFEKFPKQDVFIAPGK

SEQ ID NO: 1155 - DNA, 1077 bp, synthetic construct
  misc_feature 1..1077: note = Variant of oxalate decarboxylase from Gemmata sp. SH-PL17
  source 1..1077: mol_type = other DNA
atgggtgaccctacctttatgaacaatgtaccagaccctctgctgtcgggcaaagatttgccgacgttcaagtttgagctggaaaagagcaagggcaaagtcattggggggagttcgggaaaagaagcaaccgttgtccagttacctatctccaaaggcattgctggtgtgagcatggtacttgaaccgggtgcgatgcgcgaattgcactggcatgccacagcagcagagtgggggttcgtattatggggccacgtccgtacgacggtgatcgatccacaaggtctggccgaaaccaacgactttggaccgggcgacgtgtggtattttcctcgcggtcatgggcacatgctggaatgcctgggcgataaaccggcgcatttcattctgatcttcgataacggctacttctcagagtttggcaccttctctattactgactggatcggtcacacaccgaaagcgcttctcgccaagaactttaagctgcccgaaagcgcttttgatgggtttcccaaaaaagaggtctattttgcacgtggcgcggttccaccagccacccctgcagcgcctttacagggatgtaagctgccaccactcacgcataaatacgaactcctcgaacaagaacctcataaagtttttaaaggtggtcgtgaatggcgcgtggatagcactcgttttcccatttccaagactgtaaccggcgttgttcttgatttggaacccggcgcgttacgcgagcttcactggcatcctaatgctgacgagtggcaatatgtgatcgatggcaacattagtgtgacgatgttcggttctcatggccgtgtacgcaccgaacagatggagaagggtgatgtcgggtatattccacaggggtatggccacagcatcgaaaatgttggagatcgtccttgtcgcgtcttgattggctttaacacaggtaactaccaagcgatcgacttatcacagtggattgcaggtaatcccgcggatgttcttgccacgaacttctccaaacccaccagcctctttgaaaagttcccaaaacaggacgtgtttattgctcctggcaag

SEQ ID NO: 1156 - protein, 359 aa, synthetic construct
  REGION 1..359: note = Variant of oxalate decarboxylase from Gemmata sp. SH-PL17
MGDPTFMNNVPDPLLSGKDLPTFKFELEKSKGKVIGGSSGKEATVVQLPISKGIAGVSMVLEPGAMRELHWHATAAEWGFVLWGHVRTTVIDPQGLAETNDFGPGDVWYFPRGHGHMLECLGDKPAHFILIFDNGYFSEFGTFSITDWIGHTPKALLAKNFKLPESAFDGFPKKEVYFARGAVPPATPAAPLQGCKLPPLTHKYELLEQEPHKVFKGGREWRVDSTRFPISKTVTGVVLDLEPGALRELHWHPNADEWQYVIDGNISVTMFGSHGRVRTEQMEKGDVGYIPQGYGHSIENVGDRPCRVLIGFNTGNYQAIDLSQWIAGNPADVLATNFSKPTSLFEKFPKQDVFIAPGK

SEQ ID NO: 1157 - DNA, 1077 bp, synthetic construct
  misc_feature 1..1077: note = Variant of oxalate decarboxylase from Gemmata sp. SH-PL17
  source 1..1077: mol_type = other DNA
atgggtgaccctacctttatgaacaatgtaccagaccctctgctgtcgggcaaagatttgccgacgttcaagtttgagctggaaaagagcaagggcaaagtcattggggggagttcgggaaaagaagcaaccgttgtccagttacctatctccaaaggcattgctggtgtgagcatggtacttgaaccgggtgcgatgcgcgaattgcactggcatgccacagcagcagagtggaagttcgtattatggggccacgtccgtacgacggtgatcgatccacaaggtctggccgaaaccaacgactttggaccgggcgacgtgtggtattttcctcgcggtcatgggcacatgctggaatgcctgggcgataaaccggcgcatttcattctgatcttcgataacggctacttctcagagtttggcaccttctctattactgactggatcggtcacacaccgaaagcgcttctcgccaagaactttaagctgcccgaaagcgcttttgatgggtttcccaaaaaagaggtctattttgcacgtggcgcggttccaccagccacccctgcagcgcctttacagggactgaagctgccaccactcacgcataaatacgaactcctcgaacaagaacctcataaagtttttaaaggtggtcgtgaatggcgcgtggatagcactcgttttcccatttccaagactgtaaccggcgttgttcttgatttggaacccggcgcgttacgcgagcttcactggcatcctaatgctgacgagtggcaatatgtgatcgatggcaacattagtgtgacgatgttcggttctcatggccgtgtacgcaccgaacagatggagaagggtgatgtcgggtatattccacaggggtatggccacagcatcgaaaatgttggagatcgtccttgtcgcgtcttgattggctttaacacaggtaactaccaagcgatcgacttatcacagtggattgcaggtaatcccgcggatgttcttgccacgaacttctccaaacccaccagcctctttgaaaagttcccaaaacaggacgtgtttattgctcctggcaag

SEQ ID NO: 1158 - protein, 359 aa, synthetic construct
  REGION 1..359: note = Variant of oxalate decarboxylase from Gemmata sp. SH-PL17
MGDPTFMNNVPDPLLSGKDLPTFKFELEKSKGKVIGGSSGKEATVVQLPISKGIAGVSMVLEPGAMRELHWHATAAEWKFVLWGHVRTTVIDPQGLAETNDFGPGDVWYFPRGHGHMLECLGDKPAHFILIFDNGYFSEFGTFSITDWIGHTPKALLAKNFKLPESAFDGFPKKEVYFARGAVPPATPAAPLQGLKLPPLTHKYELLEQEPHKVFKGGREWRVDSTRFPISKTVTGVVLDLEPGALRELHWHPNADEWQYVIDGNISVTMFGSHGRVRTEQMEKGDVGYIPQGYGHSIENVGDRPCRVLIGFNTGNYQAIDLSQWIAGNPADVLATNFSKPTSLFEKFPKQDVFIAPGK

SEQ ID NO: 1159 - DNA, 1077 bp, synthetic construct
  misc_feature 1..1077: note = Variant of oxalate decarboxylase from Gemmata sp. SH-PL17
  source 1..1077: mol_type = other DNA
atgggtgaccctacctttatgaacaatgtaccagaccctctgctgtcgggcaaagatttgccgacgttcaagtttgagctggaaaagagcaagggcaaagtcattggggggagttcgggaaaagaagcaaccgttgtccagttacctatctccaaaggcattgctggtgtgagcatgtggcttgaaccgggtgcgatgcgcgaattgcactggcatgccacagcagcagagtgggggttcgtattatggggccacgtccgtacgacggtgatcgatccacaaggtctggccgaaaccaacgactttggaccgggcgacgtgtggtattttcctcgcggtcatgggcacatgctggaatgcctgggcgataaaccggcgcatttcattctgatcttcgataacggctacttctcagagtttggcaccttctctattactgactggatcggtcacacaccgaaagcgcttctcgccaagaactttaagctgcccgaaagcgcttttgatgggtttcccaaaaaagaggtctattttgcacgtggcgcggttccaccagccacccctgcagcgcctttacagggactgaagctgccaccactcacgcataaatacgaactcctcgaacaagaacctcataaagtttttaaaggtggtcgtgaatggcgcgtggatagcactcgttttcccatttccaagactgtaaccggcgttgttcttgatttggaacccggcgcgttacgcgagcttcactggcatcctaatgctgacgagtggcaatatgtgatcgatggcaacattagtgtgacgatgttcggttctcatggccgtgtacgcaccgaacagatggagaagggtgatgtcgggtatattccacaggggtatggccacagcatcgaaaatgttggagatcgtccttgtcgcgtcttgattggctttaacacaggtaactaccaagcgatcgacttatcacagtggattgcaggtaatcccgcggatgttcttgccacgaacttctccaaacccaccagcctctttgaaaagttcccaaaacaggacgtgtttattgctcctggcaag

SEQ ID NO: 1160 - protein, 359 aa, synthetic construct
  REGION 1..359: note = Variant of oxalate decarboxylase from Gemmata sp. SH-PL17
MGDPTFMNNVPDPLLSGKDLPTFKFELEKSKGKVIGGSSGKEATVVQLPISKGIAGVSMWLEPGAMRELHWHATAAEWGFVLWGHVRTTVIDPQGLAETNDFGPGDVWYFPRGHGHMLECLGDKPAHFILIFDNGYFSEFGTFSITDWIGHTPKALLAKNFKLPESAFDGFPKKEVYFARGAVPPATPAAPLQGLKLPPLTHKYELLEQEPHKVFKGGREWRVDSTRFPISKTVTGVVLDLEPGALRELHWHPNADEWQYVIDGNISVTMFGSHGRVRTEQMEKGDVGYIPQGYGHSIENVGDRPCRVLIGFNTGNYQAIDLSQWIAGNPADVLATNFSKPTSLFEKFPKQDVFIAPGK

SEQ ID NO: 1161 - DNA, 1077 bp, synthetic construct
  misc_feature 1..1077: note = Variant of oxalate decarboxylase from Gemmata sp. SH-PL17
  source 1..1077: mol_type = other DNA
atgggtgaccctacctttatgaacaatgtaccagaccctctgctgtcgggcaaagatttgccgacgttcaagtttgagctggaaaagagcaagggcaaagtcattggggggagttcgggaaaagaagcaaccgttgtccagttacctatctccaaaggcattgctggtgtgagcatggtacttgaaccgggtgcgatgcgcgaattgcactggcatgccacagcagcagagtgggggttcgtattatggggccacgtccgtacgacggtgatcgatccacaaggtctggccgaaaccaacgactttggaccgggcgacgtgtggtattttcctcgcggtcatgggcacatgctggaatgcctgggcgataaaccggcgcatttcattctgatcttcgataacggctacttctcagagtttggcaccttctctattactgactggatcggtcacacaccgaaagcgcttctcgccaagaactttaagctgcccgaaagcgcttttgatgggtttcccaaatctgaggtctattttgcacgtggcgcggttccaccagccacccctgcagcgcctttacagggactgaagctgccaccactcacgcataaatacgaactcctcgaacaagaacctcataaagtttttaaaggtggtcgtgaatggcgcgtggatagcactcgttttcccatttccaagactgtaaccggcgttgttcttgatttggaacccggcgcgttacgcgagcttcactggcatcctaatgctgacgagtggcaatatgtgatcgatggcaacattagtgtgacgatgttcggttctcatggccgtgtacgcaccgaacagatggagaagggtgatgtcgggtatattccacaggggtatggccacagcatcgaaaatgttggagatcgtccttgtcgcgtcttgattggctttaacacaggtaactaccaagcgatcgacttatcacagtggattgcaggtaatcccgcggatgttcttgccacgaacttctccaaacccaccagcctctttgaaaagttcccaaaacaggacgtgtttattgctcctggcaag

SEQ ID NO: 1162 - protein, 359 aa, synthetic construct
  REGION 1..359: note = Variant of oxalate decarboxylase from Gemmata sp. SH-PL17
MGDPTFMNNVPDPLLSGKDLPTFKFELEKSKGKVIGGSSGKEATVVQLPISKGIAGVSMVLEPGAMRELHWHATAAEWGFVLWGHVRTTVIDPQGLAETNDFGPGDVWYFPRGHGHMLECLGDKPAHFILIFDNGYFSEFGTFSITDWIGHTPKALLAKNFKLPESAFDGFPKSEVYFARGAVPPATPAAPLQGLKLPPLTHKYELLEQEPHKVFKGGREWRVDSTRFPISKTVTGVVLDLEPGALRELHWHPNADEWQYVIDGNISVTMFGSHGRVRTEQMEKGDVGYIPQGYGHSIENVGDRPCRVLIGFNTGNYQAIDLSQWIAGNPADVLATNFSKPTSLFEKFPKQDVFIAPGK

SEQ ID NO: 1163 - DNA, 1077 bp, synthetic construct
  misc_feature 1..1077: note = Variant of oxalate decarboxylase from Gemmata sp. SH-PL17
  source 1..1077: mol_type = other DNA
atgggtgaccctacctttatgaacaatgtaccagacattctgctgtcgggcaaagatttgccgacgttcaagtttgagctggaaaagagcaagggcaaagtcattggggggagttcgggaaaagaagcaaccgttgtccagttacctatctccaaaggcattgctggtgtgagcatggtacttgaaccgggtgcgatgcgcgaattgcactggcatgccacagcagcagagtgggggttcgtattatggggccacgtccgtacgacggtgatcgatccacaaggtctggccgaaaccaacgactttggaccgggcgacgtgtggtattttcctcgcggtcatgggcacatgctggaatgcctgggcgataaaccggcgcatttcattctgatcttcgataacggctacttctcagagtttggcaccttctctattactgactggatcggtcacacaccgaaagcgcttctcgccaagaactttaagctgcccgaaagcgcttttgatgggtttcccaaaaaagaggtctattttgcacgtggcgcggttccaccagccacccctgcagcgcctttacagggactgaagctgccaccactcacgcataaatacgaactcctcgaacaagaacctcataaagtttttaaaggtggtcgtgaatggcgcgtggatagcactcgttttcccatttccaagactgtaaccggcgttgttcttgatttggaacccggcgcgttacgcgagcttcactggcatcctaatgctgacgagtggcaatatgtgatcgatggcaacattagtgtgacgatgttcggttctcatggccgtgtacgcaccgaacagatggagaagggtgatgtcgggtatattccacaggggtatggccacagcatcgaaaatgttggagatcgtccttgtcgcgtcttgattggctttaacacaggtaactaccaagcgatcgacttatcacagtggattgcaggtaatcccgcggatgttcttgccacgaacttctccaaacccaccagcctctttgaaaagttcccaaaacaggacgtgtttattgctcctggcaag

SEQ ID NO: 1164 - protein, 359 aa, synthetic construct
  REGION 1..359: note = Variant of oxalate decarboxylase from Gemmata sp. SH-PL17
MGDPTFMNNVPDILLSGKDLPTFKFELEKSKGKVIGGSSGKEATVVQLPISKGIAGVSMVLEPGAMRELHWHATAAEWGFVLWGHVRTTVIDPQGLAETNDFGPGDVWYFPRGHGHMLECLGDKPAHFILIFDNGYFSEFGTFSITDWIGHTPKALLAKNFKLPESAFDGFPKKEVYFARGAVPPATPAAPLQGLKLPPLTHKYELLEQEPHKVFKGGREWRVDSTRFPISKTVTGVVLDLEPGALRELHWHPNADEWQYVIDGNISVTMFGSHGRVRTEQMEKGDVGYIPQGYGHSIENVGDRPCRVLIGFNTGNYQAIDLSQWIAGNPADVLATNFSKPTSLFEKFPKQDVFIAPGK

SEQ ID NO: 1165 - DNA, 1077 bp, synthetic construct
  misc_feature 1..1077: note = Variant of oxalate decarboxylase from Gemmata sp. SH-PL17
  source 1..1077: mol_type = other DNA
atgggtgaccctacctttatgaacaatgtaccagaccctctgctgtcgggcaaagatttgccgacgttcaagtttgagctggaaaagagcaagggcaaagtcattggggggagttcgggaaaagaagcaaccgttgtccagttacctatctccaaaggcattgctggtgtgagcatgcatcttgaaccgggtgcgatgcgcgaattgcactggcatgccacagcagcagagtgggggttcgtattatggggccacgtccgtacgacggtgatcgatccacaaggtctggccgaaaccaacgactttggaccgggcgacgtgtggtattttcctcgcggtcatgggcacatgctggaatgcctgggcgataaaccggcgcatttcattctgatcttcgataacggctacttctcagagtttggcaccttctctattactgactggatcggtcacacaccgaaagcgcttctcgccaagaactttaagctgcccgaaagcgcttttgatgggtttcccaaaaaagaggtctattttgcacgtggcgcggttccaccagccacccctgcagcgcctttacagggactgaagctgccaccactcacgcataaatacgaactcctcgaacaagaacctcataaagtttttaaaggtggtcgtgaatggcgcgtggatagcactcgttttcccatttccaagactgtaaccggcgttgttcttgatttggaacccggcgcgttacgcgagcttcactggcatcctaatgctgacgagtggcaatatgtgatcgatggcaacattagtgtgacgatgttcggttctcatggccgtgtacgcaccgaacagatggagaagggtgatgtcgggtatattccacaggggtatggccacagcatcgaaaatgttggagatcgtccttgtcgcgtcttgattggctttaacacaggtaactaccaagcgatcgacttatcacagtggattgcaggtaatcccgcggatgttcttgccacgaacttctccaaacccaccagcctctttgaaaagttcccaaaacaggacgtgtttattgctcctggcaag

SEQ ID NO: 1166 - protein, 359 aa, synthetic construct
  REGION 1..359: note = Variant of oxalate decarboxylase from Gemmata sp. SH-PL17
MGDPTFMNNVPDPLLSGKDLPTFKFELEKSKGKVIGGSSGKEATVVQLPISKGIAGVSMHLEPGAMRELHWHATAAEWGFVLWGHVRTTVIDPQGLAETNDFGPGDVWYFPRGHGHMLECLGDKPAHFILIFDNGYFSEFGTFSITDWIGHTPKALLAKNFKLPESAFDGFPKKEVYFARGAVPPATPAAPLQGLKLPPLTHKYELLEQEPHKVFKGGREWRVDSTRFPISKTVTGVVLDLEPGALRELHWHPNADEWQYVIDGNISVTMFGSHGRVRTEQMEKGDVGYIPQGYGHSIENVGDRPCRVLIGFNTGNYQAIDLSQWIAGNPADVLATNFSKPTSLFEKFPKQDVFIAPGK

SEQ ID NO: 1167 - DNA, 1077 bp, synthetic construct
  misc_feature 1..1077: note = Variant of oxalate decarboxylase from Gemmata sp. SH-PL17
  source 1..1077: mol_type = other DNA
atgggtgaccctacctttatgaacaatgtaccagaccctctgctgtcgggcaaagatttgccgacgttcaagtttgagctggaaaagagcgagggcaaagtcattggggggagttcgggaaaagaagcaaccgttgtccagttacctatctccaaaggcattgctggtgtgagcatggtacttgaaccgggtgcgatgcgcgaattgcactggcatgccacagcagcagagtgggggttcgtattatggggccacgtccgtacgacggtgatcgatccacaaggtctggccgaaaccaacgactttggaccgggcgacgtgtggtattttcctcgcggtcatgggcacatgctggaatgcctgggcgataaaccggcgcatttcattctgatcttcgataacggctacttctcagagtttggcaccttctctattactgactggatcggtcacacaccgaaagcgcttctcgccaagaactttaagctgcccgaaagcgcttttgatgggtttcccaaaaaagaggtctattttgcacgtggcgcggttccaccagccacccctgcagcgcctttacagggactgaagctgccaccactcacgcataaatacgaactcctcgaacaagaacctcataaagtttttaaaggtggtcgtgaatggcgcgtggatagcactcgttttcccatttccaagactgtaaccggcgttgttcttgatttggaacccggcgcgttacgcgagcttcactggcatcctaatgctgacgagtggcaatatgtgatcgatggcaacattagtgtgacgatgttcggttctcatggccgtgtacgcaccgaacagatggagaagggtgatgtcgggtatattccacaggggtatggccacagcatcgaaaatgttggagatcgtccttgtcgcgtcttgattggctttaacacaggtaactaccaagcgatcgacttatcacagtggattgcaggtaatcccgcggatgttcttgccacgaacttctccaaacccaccagcctctttgaaaagttcccaaaacaggacgtgtttattgctcctggcaag

SEQ ID NO: 1168 - protein, 359 aa, synthetic construct
  REGION 1..359: note = Variant of oxalate decarboxylase from Gemmata sp. SH-PL17
MGDPTFMNNVPDPLLSGKDLPTFKFELEKSEGKVIGGSSGKEATVVQLPISKGIAGVSMVLEPGAMRELHWHATAAEWGFVLWGHVRTTVIDPQGLAETNDFGPGDVWYFPRGHGHMLECLGDKPAHFILIFDNGYFSEFGTFSITDWIGHTPKALLAKNFKLPESAFDGFPKKEVYFARGAVPPATPAAPLQGLKLPPLTHKYELLEQEPHKVFKGGREWRVDSTRFPISKTVTGVVLDLEPGALRELHWHPNADEWQYVIDGNISVTMFGSHGRVRTEQMEKGDVGYIPQGYGHSIENVGDRPCRVLIGFNTGNYQAIDLSQWIAGNPADVLATNFSKPTSLFEKFPKQDVFIAPGK

SEQ ID NO: 1169 - DNA, 1077 bp, synthetic construct
  misc_feature 1..1077: note = Variant of oxalate decarboxylase from Gemmata sp. SH-PL17
  source 1..1077: mol_type = other DNA
atgggtgaccctacctttatgaacaatgtaccagaccctctgctgtcgggcaaagatttgccgacgttcaagtttgagctggaaaagagcaagggcaaagtcattggggggagttcgggaaaagaagcaaccgttgtccagttacctatctccaaaggcattgctggtgtgagcatggtacttgaaccgggtgcgatgcgcgaattgcactggcatgccacagcagcagagtgggggttcgtattatggggccacgtccgtacgacggtgatcgatccacaaggtgaggccgaaaccaacgactttggaccgggcgacgtgtggtattttcctcgcggtcatgggcacatgctggaatgcctgggcgataaaccggcgcatttcattctgatcttcgataacggctacttctcagagtttggcaccttctctattactgactggatcggtcacacaccgaaagcgcttctcgccaagaactttaagctgcccgaaagcgcttttgatgggtttcccaaaaaagaggtctattttgcacgtggcgcggttccaccagccacccctgcagcgcctttacagggactgaagctgccaccactcacgcataaatacgaactcctcgaacaagaacctcataaagtttttaaaggtggtcgtgaatggcgcgtggatagcactcgttttcccatttccaagactgtaaccggcgttgttcttgatttggaacccggcgcgttacgcgagcttcactggcatcctaatgctgacgagtggcaatatgtgatcgatggcaacattagtgtgacgatgttcggttctcatggccgtgtacgcaccgaacagatggagaagggtgatgtcgggtatattccacaggggtatggccacagcatcgaaaatgttggagatcgtccttgtcgcgtcttgattggctttaacacaggtaactaccaagcgatcgacttatcacagtggattgcaggtaatcccgcggatgttcttgccacgaacttctccaaacccaccagcctctttgaaaagttcccaaaacaggacgtgtttattgctcctggcaag

SEQ ID NO: 1170 - protein, 359 aa, synthetic construct
  REGION 1..359: note = Variant of oxalate decarboxylase from Gemmata sp. SH-PL17
MGDPTFMNNVPDPLLSGKDLPTFKFELEKSKGKVIGGSSGKEATVVQLPISKGIAGVSMVLEPGAMRELHWHATAAEWGFVLWGHVRTTVIDPQGEAETNDFGPGDVWYFPRGHGHMLECLGDKPAHFILIFDNGYFSEFGTFSITDWIGHTPKALLAKNFKLPESAFDGFPKKEVYFARGAVPPATPAAPLQGLKLPPLTHKYELLEQEPHKVFKGGREWRVDSTRFPISKTVTGVVLDLEPGALRELHWHPNADEWQYVIDGNISVTMFGSHGRVRTEQMEKGDVGYIPQGYGHSIENVGDRPCRVLIGFNTGNYQAIDLSQWIAGNPADVLATNFSKPTSLFEKFPKQDVFIAPGK

SEQ ID NO: 1171 - DNA, 1077 bp, synthetic construct
  misc_feature 1..1077: note = Variant of oxalate decarboxylase from Gemmata sp. SH-PL17
  source 1..1077: mol_type = other DNA
atgggtgaccctacctttatgaacaatgtaccagaccctctgctgtcgggcaaagatttgccgacgttcaagtttgagctggaaaagagcaagggcaaagtcattggggggagttcgggaaaagaagcaaccgttgtccagttacctatctccaaaggcattgctggtgtgagcatggtacttgaaccgggtgcgatgcgcgaattgcactggcatgccacagcagcagagtgggggttcgtattaaagggccacgtccgtacgacggtgatcgatccacaaggtctggccgaaaccaacgactttggaccgggcgacgtgtggtattttcctcgcggtcatgggcacatgctggaatgcctgggcgataaaccggcgcatttcattctgatcttcgataacggctacttctcagagtttggcaccttctctattactgactggatcggtcacacaccgaaagcgcttctcgccaagaactttaagctgcccgaaagcgcttttgatgggtttcccaaaaaagaggtctattttgcacgtggcgcggttccaccagccacccctgcagcgcctttacagggactgaagctgccaccactcacgcataaatacgaactcctcgaacaagaacctcataaagtttttaaaggtggtcgtgaatggcgcgtggatagcactcgttttcccatttccaagactgtaaccggcgttgttcttgatttggaacccggcgcgttacgcgagcttcactggcatcctaatgctgacgagtggcaatatgtgatcgatggcaacattagtgtgacgatgttcggttctcatggccgtgtacgcaccgaacagatggagaagggtgatgtcgggtatattccacaggggtatggccacagcatcgaaaatgttggagatcgtccttgtcgcgtcttgattggctttaacacaggtaactaccaagcgatcgacttatcacagtggattgcaggtaatcccgcggatgttcttgccacgaacttctccaaacccaccagcctctttgaaaagttcccaaaacaggacgtgtttattgctcctggcaag

SEQ ID NO: 1172 - protein, 359 aa, synthetic construct
  REGION 1..359: note = Variant of oxalate decarboxylase from Gemmata sp. SH-PL17
MGDPTFMNNVPDPLLSGKDLPTFKFELEKSKGKVIGGSSGKEATVVQLPISKGIAGVSMVLEPGAMRELHWHATAAEWGFVLKGHVRTTVIDPQGLAETNDFGPGDVWYFPRGHGHMLECLGDKPAHFILIFDNGYFSEFGTFSITDWIGHTPKALLAKNFKLPESAFDGFPKKEVYFARGAVPPATPAAPLQGLKLPPLTHKYELLEQEPHKVFKGGREWRVDSTRFPISKTVTGVVLDLEPGALRELHWHPNADEWQYVIDGNISVTMFGSHGRVRTEQMEKGDVGYIPQGYGHSIENVGDRPCRVLIGFNTGNYQAIDLSQWIAGNPADVLATNFSKPTSLFEKFPKQDVFIAPGK

SEQ ID NO: 1173 - DNA, 1077 bp, synthetic construct
  misc_feature 1..1077: note = Variant of oxalate decarboxylase from Gemmata sp. SH-PL17
  source 1..1077: mol_type = other DNA
atgggtgaccctacctttatgaacaatgtaccagaccctctgctgtcgggcaaagatttgccgacgttcaagtttgagctggaaaagagccagggcaaagtcattggggggagttcgggaaaagaagcaaccgttgtccagttacctatctccaaaggcattgctggtgtgagcatggtacttgaaccgggtgcgatgcgcgaattgcactggcatgccacagcagcagagtgggggttcgtattatggggccacgtccgtacgacggtgatcgatccacaaggtctggccgaaaccaacgactttggaccgggcgacgtgtggtattttcctcgcggtcatgggcacatgctggaatgcctgggcgataaaccggcgcatttcattctgatcttcgataacggctacttctcagagtttggcaccttctctattactgactggatcggtcacacaccgaaagcgcttctcgccaagaactttaagctgcccgaaagcgcttttgatgggtttcccaaaaaagaggtctattttgcacgtggcgcggttccaccagccacccctgcagcgcctttacagggactgaagctgccaccactcacgcataaatacgaactcctcgaacaagaacctcataaagtttttaaaggtggtcgtgaatggcgcgtggatagcactcgttttcccatttccaagactgtaaccggcgttgttcttgatttggaacccggcgcgttacgcgagcttcactggcatcctaatgctgacgagtggcaatatgtgatcgatggcaacattagtgtgacgatgttcggttctcatggccgtgtacgcaccgaacagatggagaagggtgatgtcgggtatattccacaggggtatggccacagcatcgaaaatgttggagatcgtccttgtcgcgtcttgattggctttaacacaggtaactaccaagcgatcgacttatcacagtggattgcaggtaatcccgcggatgttcttgccacgaacttctccaaacccaccagcctctttgaaaagttcccaaaacaggacgtgtttattgctcctggcaag

SEQ ID NO: 1174 - protein, 359 aa, synthetic construct
  REGION 1..359: note = Variant of oxalate decarboxylase from Gemmata sp. SH-PL17
MGDPTFMNNVPDPLLSGKDLPTFKFELEKSQGKVIGGSSGKEATVVQLPISKGIAGVSMVLEPGAMRELHWHATAAEWGFVLWGHVRTTVIDPQGLAETNDFGPGDVWYFPRGHGHMLECLGDKPAHFILIFDNGYFSEFGTFSITDWIGHTPKALLAKNFKLPESAFDGFPKKEVYFARGAVPPATPAAPLQGLKLPPLTHKYELLEQEPHKVFKGGREWRVDSTRFPISKTVTGVVLDLEPGALRELHWHPNADEWQYVIDGNISVTMFGSHGRVRTEQMEKGDVGYIPQGYGHSIENVGDRPCRVLIGFNTGNYQAIDLSQWIAGNPADVLATNFSKPTSLFEKFPKQDVFIAPGK

SEQ ID NO: 1175 - DNA, 1077 bp, synthetic construct
  misc_feature 1..1077: note = Variant of oxalate decarboxylase from Gemmata sp. SH-PL17
  source 1..1077: mol_type = other DNA
atgggtgaccctacctttatgaacaatgtaccagaccctctgctgaagggcaaagatttgccgacgttcaagtttgagctggaaaagagcaagggcaaagtcattggggggagttcgggaaaagaagcaaccgttgtccagttacctatctccaaaggcattgctggtgtgagcatggtacttgaaccgggtgcgatgcgcgaattgcactggcatgccacagcagcagagtgggggttcgtattatggggccacgtccgtacgacggtgatcgatccacaaggtctggccgaaaccaacgactttggaccgggcgacgtgtggtattttcctcgcggtcatgggcacatgctggaatgcctgggcgataaaccggcgcatttcattctgatcttcgataacggctacttctcagagtttggcaccttctctattactgactggatcggtcacacaccgaaagcgcttctcgccaagaactttaagctgcccgaaagcgcttttgatgggtttcccaaaaaagaggtctattttgcacgtggcgcggttccaccagccacccctgcagcgcctttacagggactgaagctgccaccactcacgcataaatacgaactcctcgaacaagaacctcataaagtttttaaaggtggtcgtgaatggcgcgtggatagcactcgttttcccatttccaagactgtaaccggcgttgttcttgatttggaacccggcgcgttacgcgagcttcactggcatcctaatgctgacgagtggcaatatgtgatcgatggcaacattagtgtgacgatgttcggttctcatggccgtgtacgcaccgaacagatggagaagggtgatgtcgggtatattccacaggggtatggccacagcatcgaaaatgttggagatcgtccttgtcgcgtcttgattggctttaacacaggtaactaccaagcgatcgacttatcacagtggattgcaggtaatcccgcggatgttcttgccacgaacttctccaaacccaccagcctctttgaaaagttcccaaaacaggacgtgtttattgctcctggcaag

SEQ ID NO: 1176 - protein, 359 aa, synthetic construct
  REGION 1..359: note = Variant of oxalate decarboxylase from Gemmata sp. SH-PL17
MGDPTFMNNVPDPLLKGKDLPTFKFELEKSKGKVIGGSSGKEATVVQLPISKGIAGVSMVLEPGAMRELHWHATAAEWGFVLWGHVRTTVIDPQGLAETNDFGPGDVWYFPRGHGHMLECLGDKPAHFILIFDNGYFSEFGTFSITDWIGHTPKALLAKNFKLPESAFDGFPKKEVYFARGAVPPATPAAPLQGLKLPPLTHKYELLEQEPHKVFKGGREWRVDSTRFPISKTVTGVVLDLEPGALRELHWHPNADEWQYVIDGNISVTMFGSHGRVRTEQMEKGDVGYIPQGYGHSIENVGDRPCRVLIGFNTGNYQAIDLSQWIAGNPADVLATNFSKPTSLFEKFPKQDVFIAPGK

SEQ ID NO: 1177 - DNA, 1077 bp, synthetic construct
  misc_feature 1..1077: note = Variant of oxalate decarboxylase from Gemmata sp. SH-PL17
  source 1..1077: mol_type = other DNA
atgggtgaccctacctttatgaacaatgtaccagaccctctgctgtcgggcaaagatttgccgacgttcaagtttgagctggaaaagagcaagggcaaagtcattggggggagttcgggaaaagaagcaaccgttgtccagttacctatctccaaaggcattgctggtgtgagcatggtacttgaaccgggtgcgatgcgcgaattgcactggcatgccacagcagcagagtgggggttcgtattatggggccacgtccgtacgacggtgatcgatccacaaggtctggccgaaaccaacgactttggaccgggcgacgtgtggtattttcctcgcggtcatgggcacatgctggaatgcctgggcgataaaccggcgcatttcattctgatcttcgataacggctacttctcagagtttggcaccttctctattactgactggatcggtcacacaccgaaagcgcttctcgccaagaactttaagctgcccgaaagcgcttttgatgggtttcccaaaatggaggtctattttgcacgtggcgcggttccaccagccacccctgcagcgcctttacagggactgaagctgccaccactcacgcataaatacgaactcctcgaacaagaacctcataaagtttttaaaggtggtcgtgaatggcgcgtggatagcactcgttttcccatttccaagactgtaaccggcgttgttcttgatttggaacccggcgcgttacgcgagcttcactggcatcctaatgctgacgagtggcaatatgtgatcgatggcaacattagtgtgacgatgttcggttctcatggccgtgtacgcaccgaacagatggagaagggtgatgtcgggtatattccacaggggtatggccacagcatcgaaaatgttggagatcgtccttgtcgcgtcttgattggctttaacacaggtaactaccaagcgatcgacttatcacagtggattgcaggtaatcccgcggatgttcttgccacgaacttctccaaacccaccagcctctttgaaaagttcccaaaacaggacgtgtttattgctcctggcaag

SEQ ID NO: 1178 - protein, 359 aa, synthetic construct
  REGION 1..359: note = Variant of oxalate decarboxylase from Gemmata sp. SH-PL17
MGDPTFMNNVPDPLLSGKDLPTFKFELEKSKGKVIGGSSGKEATVVQLPISKGIAGVSMVLEPGAMRELHWHATAAEWGFVLWGHVRTTVIDPQGLAETNDFGPGDVWYFPRGHGHMLECLGDKPAHFILIFDNGYFSEFGTFSITDWIGHTPKALLAKNFKLPESAFDGFPKMEVYFARGAVPPATPAAPLQGLKLPPLTHKYELLEQEPHKVFKGGREWRVDSTRFPISKTVTGVVLDLEPGALRELHWHPNADEWQYVIDGNISVTMFGSHGRVRTEQMEKGDVGYIPQGYGHSIENVGDRPCRVLIGFNTGNYQAIDLSQWIAGNPADVLATNFSKPTSLFEKFPKQDVFIAPGK

SEQ ID NO: 1179 - DNA, 1077 bp, synthetic construct
  misc_feature 1..1077: note = Variant of oxalate decarboxylase from Gemmata sp. SH-PL17
  source 1..1077: mol_type = other DNA
atgggtgaccctacctttatgaacaatgtaccagaccctctgctgtcgggcaaagatttgccgacgttcaagtttgagctggaaaagagcaagggcaaagtcattggggttagttcgggaaaagaagcaaccgttgtccagttacctatctccaaaggcattgctggtgtgagcatggtacttgaaccgggtgcgatgcgcgaattgcactggcatgccacagcagcagagtgggggttcgtattatggggccacgtccgtacgacggtgatcgatccacaaggtctggccgaaaccaacgactttggaccgggcgacgtgtggtattttcctcgcggtcatgggcacatgctggaatgcctgggcgataaaccggcgcatttcattctgatcttcgataacggctacttctcagagtttggcaccttctctattactgactggatcggtcacacaccgaaagcgcttctcgccaagaactttaagctgcccgaaagcgcttttgatgggtttcccaaaaaagaggtctattttgcacgtggcgcggttccaccagccacccctgcagcgcctttacagggactgaagctgccaccactcacgcataaatacgaactcctcgaacaagaacctcataaagtttttaaaggtggtcgtgaatggcgcgtggatagcactcgttttcccatttccaagactgtaaccggcgttgttcttgatttggaacccggcgcgttacgcgagcttcactggcatcctaatgctgacgagtggcaatatgtgatcgatggcaacattagtgtgacgatgttcggttctcatggccgtgtacgcaccgaacagatggagaagggtgatgtcgggtatattccacaggggtatggccacagcatcgaaaatgttggagatcgtccttgtcgcgtcttgattggctttaacacaggtaactaccaagcgatcgacttatcacagtggattgcaggtaatcccgcggatgttcttgccacgaacttctccaaacccaccagcctctttgaaaagttcccaaaacaggacgtgtttattgctcctggcaag

SEQ ID NO: 1180 - protein, 359 aa, synthetic construct
  REGION 1..359: note = Variant of oxalate decarboxylase from Gemmata sp. SH-PL17
MGDPTFMNNVPDPLLSGKDLPTFKFELEKSKGKVIGVSSGKEATVVQLPISKGIAGVSMVLEPGAMRELHWHATAAEWGFVLWGHVRTTVIDPQGLAETNDFGPGDVWYFPRGHGHMLECLGDKPAHFILIFDNGYFSEFGTFSITDWIGHTPKALLAKNFKLPESAFDGFPKKEVYFARGAVPPATPAAPLQGLKLPPLTHKYELLEQEPHKVFKGGREWRVDSTRFPISKTVTGVVLDLEPGALRELHWHPNADEWQYVIDGNISVTMFGSHGRVRTEQMEKGDVGYIPQGYGHSIENVGDRPCRVLIGFNTGNYQAIDLSQWIAGNPADVLATNFSKPTSLFEKFPKQDVFIAPGK

SEQ ID NO: 1181 - DNA, 1077 bp, synthetic construct
  misc_feature 1..1077: note = Variant of oxalate decarboxylase from Gemmata sp. SH-PL17
  source 1..1077: mol_type = other DNA
atgggtgaccctacctttatgaacaatgtaccagaccctctgctgtcgggcaaagatttgccgacgttcaagtttgagctggaaaagagcaagggcaaagtcattggggggagttcgggaaaagaagcaaccgttgtccagttacctatctccaaaggcattgctggtgtgagcatggtacttgaaccgggtgcgatgcgcgaattgcactggcatgccacagcagcagagtgggatttcgtattatggggccacgtccgtacgacggtgatcgatccacaaggtctggccgaaaccaacgactttggaccgggcgacgtgtggtattttcctcgcggtcatgggcacatgctggaatgcctgggcgataaaccggcgcatttcattctgatcttcgataacggctacttctcagagtttggcaccttctctattactgactggatcggtcacacaccgaaagcgcttctcgccaagaactttaagctgcccgaaagcgcttttgatgggtttcccaaaaaagaggtctattttgcacgtggcgcggttccaccagccacccctgcagcgcctttacagggactgaagctgccaccactcacgcataaatacgaactcctcgaacaagaacctcataaagtttttaaaggtggtcgtgaatggcgcgtggatagcactcgttttcccatttccaagactgtaaccggcgttgttcttgatttggaacccggcgcgttacgcgagcttcactggcatcctaatgctgacgagtggcaatatgtgatcgatggcaacattagtgtgacgatgttcggttctcatggccgtgtacgcaccgaacagatggagaagggtgatgtcgggtatattccacaggggtatggccacagcatcgaaaatgttggagatcgtccttgtcgcgtcttgattggctttaacacaggtaactaccaagcgatcgacttatcacagtggattgcaggtaatcccgcggatgttcttgccacgaacttctccaaacccaccagcctctttgaaaagttcccaaaacaggacgtgtttattgctcctggcaag

SEQ ID NO: 1182 - protein, 359 aa, synthetic construct
  REGION 1..359: note = Variant of oxalate decarboxylase from Gemmata sp. SH-PL17
MGDPTFMNNVPDPLLSGKDLPTFKFELEKSKGKVIGGSSGKEATVVQLPISKGIAGVSMVLEPGAMRELHWHATAAEWDFVLWGHVRTTVIDPQGLAETNDFGPGDVWYFPRGHGHMLECLGDKPAHFILIFDNGYFSEFGTFSITDWIGHTPKALLAKNFKLPESAFDGFPKKEVYFARGAVPPATPAAPLQGLKLPPLTHKYELLEQEPHKVFKGGREWRVDSTRFPISKTVTGVVLDLEPGALRELHWHPNADEWQYVIDGNISVTMFGSHGRVRTEQMEKGDVGYIPQGYGHSIENVGDRPCRVLIGFNTGNYQAIDLSQWIAGNPADVLATNFSKPTSLFEKFPKQDVFIAPGK

SEQ ID NO: 1183 - DNA, 1077 bp, synthetic construct
  misc_feature 1..1077: note = Variant of oxalate decarboxylase from Gemmata sp. SH-PL17
  source 1..1077: mol_type = other DNA
atgggtgaccctacctttatgaacaatgtaccagaccctctgctgtcgggcaaagatttgccgacgttcaagtttgagctggaaaagagcaagggcaaagtcattggggggagttcgggaaaagaagcaaccgttgtccagttacctatctccaaaggcattgctggtgtgagcatggtacttgaaccgggtgcgatgcgcgaattgcactggcatgccacagcagcagagtgggggttcgtattatggggccacgtccgtacgacggtgatcgatccacaaggtctggccgaaaccaacgactttggaccgggcgacgtgtggtattttcctcgcggtcatgggcacatgctggaatgcctgggcgataaaccggcgcatttcattctgatcttcgataacggctacttctcagagtttggcaccttctctattactgactggatcggtcacacaccgaaagcgcttctcgccaagaactttaagctgcccgaaagcgcttttgatgggtttcccaaaaaagaggtctattttgcacgtggcgcggttccaccagccacccctgcagcgcctttacagggactgaagctgccaccactcacgcataaatacgaactcctcgaacaagaacctcataaagtttttaaaggtggtcgtgaatggcgcgtggatagcactcgttttcccatttccaagactgtaaccggcgttgttcttgatttggaacccggcgcgttacgcgagcttcactggcatcctaatgctgacgagtggcaatatgtgatcgatggcaacattagtgtgacgatgttcggttctcatggccgtgtacgcaccgaacagatggagaagggtgatgtcgggtatattccacaggggtatggccacagcatcgaaaatgttggagatcgtccttgtcgcgtcttgattggctttaacacaggtaactacacggcgatcgacttatcacagtggattgcaggtaatcccgcggatgttcttgccacgaacttctccaaacccaccagcctctttgaaaagttcccaaaacaggacgtgtttattgctcctggcaag

SEQ ID NO: 1184 - protein, 359 aa, synthetic construct
  REGION 1..359: note = Variant of oxalate decarboxylase from Gemmata sp. SH-PL17
MGDPTFMNNVPDPLLSGKDLPTFKFELEKSKGKVIGGSSGKEATVVQLPISKGIAGVSMVLEPGAMRELHWHATAAEWGFVLWGHVRTTVIDPQGLAETNDFGPGDVWYFPRGHGHMLECLGDKPAHFILIFDNGYFSEFGTFSITDWIGHTPKALLAKNFKLPESAFDGFPKKEVYFARGAVPPATPAAPLQGLKLPPLTHKYELLEQEPHKVFKGGREWRVDSTRFPISKTVTGVVLDLEPGALRELHWHPNADEWQYVIDGNISVTMFGSHGRVRTEQMEKGDVGYIPQGYGHSIENVGDRPCRVLIGFNTGNYTAIDLSQWIAGNPADVLATNFSKPTSLFEKFPKQDVFIAPGK

SEQ ID NO: 1185 - DNA, 1077 bp, synthetic construct
  misc_feature 1..1077: note = Variant of oxalate decarboxylase from Gemmata sp. SH-PL17
  source 1..1077: mol_type = other DNA
atgggtgaccctacctttatgaacaatgtaccagaccctctgctgtcgggcaaagatttgccgacgttcaagtttgagctggaaaagagcaagggcaaagtcattggggggagttcgggaaaagaagcaaccgttgtccagttacctatctccaaaggcattgctggtgtgagcatggtacttgaaccgggtgcgatgcgcgaattgcactggcatgccacagcagcagagtgggggttcgtattatggggccacgtccgtacgacggtgatcgatccacaaggtctggccgaaaccaacgactttggaccgggcgacgtgtggtattttcctcgcggtcatgggcacatgctggaatgcctgggcgataaaccggcgcatttcattctgatcttcgataacggctacttctcagagtttggcaccttctctattactgactggatcggtcacacaccgaaagcgcttctcgccaagaactttaagctgcccgaaagcgcttttgatgggtttcccaaaaaagaggtctattttgcacgtggcgcggttccaccagccacccctgcagcgcctttacagggatttaagctgccaccactcacgcataaatacgaactcctcgaacaagaacctcataaagtttttaaaggtggtcgtgaatggcgcgtggatagcactcgttttcccatttccaagactgtaaccggcgttgttcttgatttggaacccggcgcgttacgcgagcttcactggcatcctaatgctgacgagtggcaatatgtgatcgatggcaacattagtgtgacgatgttcggttctcatggccgtgtacgcaccgaacagatggagaagggtgatgtcgggtatattccacaggggtatggccacagcatcgaaaatgttggagatcgtccttgtcgcgtcttgattggctttaacacaggtaactaccaagcgatcgacttatcacagtggattgcaggtaatcccgcggatgttcttgccacgaacttctccaaacccaccagcctctttgaaaagttcccaaaacaggacgtgtttattgctcctggcaag

SEQ ID NO: 1186 - protein, 359 aa, synthetic construct
  REGION 1..359: note = Variant of oxalate decarboxylase from Gemmata sp. SH-PL17
MGDPTFMNNVPDPLLSGKDLPTFKFELEKSKGKVIGGSSGKEATVVQLPISKGIAGVSMVLEPGAMRELHWHATAAEWGFVLWGHVRTTVIDPQGLAETNDFGPGDVWYFPRGHGHMLECLGDKPAHFILIFDNGYFSEFGTFSITDWIGHTPKALLAKNFKLPESAFDGFPKKEVYFARGAVPPATPAAPLQGFKLPPLTHKYELLEQEPHKVFKGGREWRVDSTRFPISKTVTGVVLDLEPGALRELHWHPNADEWQYVIDGNISVTMFGSHGRVRTEQMEKGDVGYIPQGYGHSIENVGDRPCRVLIGFNTGNYQAIDLSQWIAGNPADVLATNFSKPTSLFEKFPKQDVFIAPGK

SEQ ID NO: 1187 - DNA, 1077 bp, synthetic construct
  misc_feature 1..1077: note = Variant of oxalate decarboxylase from Gemmata sp. SH-PL17
  source 1..1077: mol_type = other DNA
atgggtgaccctacctttatgaacaatgtaccagaccctctgctgtcgggcaaagatttgccgacgttcaagtttacgctggaaaagagcaagggcaaagtcattggggggagttcgggaaaagaagcaaccgttgtccagttacctatctccaaaggcattgctggtgtgagcatggtacttgaaccgggtgcgatgcgcgaattgcactggcatgccacagcagcagagtgggggttcgtattatggggccacgtccgtacgacggtgatcgatccacaaggtctggccgaaaccaacgactttggaccgggcgacgtgtggtattttcctcgcggtcatgggcacatgctggaatgcctgggcgataaaccggcgcatttcattctgatcttcgataacggctacttctcagagtttggcaccttctctattactgactggatcggtcacacaccgaaagcgcttctcgccaagaactttaagctgcccgaaagcgcttttgatgggtttcccaaaaaagaggtctattttgcacgtggcgcggttccaccagccacccctgcagcgcctttacagggactgaagctgccaccactcacgcataaatacgaactcctcgaacaagaacctcataaagtttttaaaggtggtcgtgaatggcgcgtggatagcactcgttttcccatttccaagactgtaaccggcgttgttcttgatttggaacccggcgcgttacgcgagcttcactggcatcctaatgctgacgagtggcaatatgtgatcgatggcaacattagtgtgacgatgttcggttctcatggccgtgtacgcaccgaacagatggagaagggtgatgtcgggtatattccacaggggtatggccacagcatcgaaaatgttggagatcgtccttgtcgcgtcttgattggctttaacacaggtaactaccaagcgatcgacttatcacagtggattgcaggtaatcccgcggatgttcttgccacgaacttctccaaacccaccagcctctttgaaaagttcccaaaacaggacgtgtttattgctcctggcaag

SEQ ID NO: 1188 - protein, 359 aa, synthetic construct
  REGION 1..359: note = Variant of oxalate decarboxylase from Gemmata sp. SH-PL17
MGDPTFMNNVPDPLLSGKDLPTFKFTLEKSKGKVIGGSSGKEATVVQLPISKGIAGVSMVLEPGAMRELHWHATAAEWGFVLWGHVRTTVIDPQGLAETNDFGPGDVWYFPRGHGHMLECLGDKPAHFILIFDNGYFSEFGTFSITDWIGHTPKALLAKNFKLPESAFDGFPKKEVYFARGAVPPATPAAPLQGLKLPPLTHKYELLEQEPHKVFKGGREWRVDSTRFPISKTVTGVVLDLEPGALRELHWHPNADEWQYVIDGNISVTMFGSHGRVRTEQMEKGDVGYIPQGYGHSIENVGDRPCRVLIGFNTGNYQAIDLSQWIAGNPADVLATNFSKPTSLFEKFPKQDVFIAPGK

SEQ ID NO: 1189 - DNA, 1077 bp, synthetic construct
  misc_feature 1..1077: note = Variant of oxalate decarboxylase from Gemmata sp. SH-PL17
  source 1..1077: mol_type = other DNA
atgggtgaccctacctttatgaacaatgtaccagaccctctgctgtcgggcaaagatttgccgacgttcaagtttgagctggaaaagagcaagggcaaagtcattggggggagttcgggaaaagaagcaaccgttgtccagttacctatctccaaaggcattgctggtgtgagcatggtacttgaaccgggtgcgatgcgcgaattgcactggcatgccacagcagcagagtgggggttcgtattatggggccacgtccgtacgacggtgatcgatccacaaggtctggccgaaaccaacgactttggaccgggcgacgtgtggtattttcctcgcggtcatgggcacatgctggaatgcctgggcgataaaccggcgcatttcattctgatcttcgataacggctacttctcagagtttggcaccttctctattactgactggatcggtcacacaccgaaagcgcttctcgccaagaactttaagctgcccgaaagcgcttttgatgggtttcccaaacaggaggtctattttgcacgtggcgcggttccaccagccacccctgcagcgcctttacagggactgaagctgccaccactcacgcataaatacgaactcctcgaacaagaacctcataaagtttttaaaggtggtcgtgaatggcgcgtggatagcactcgttttcccatttccaagactgtaaccggcgttgttcttgatttggaacccggcgcgttacgcgagcttcactggcatcctaatgctgacgagtggcaatatgtgatcgatggcaacattagtgtgacgatgttcggttctcatggccgtgtacgcaccgaacagatggagaagggtgatgtcgggtatattccacaggggtatggccacagcatcgaaaatgttggagatcgtccttgtcgcgtcttgattggctttaacacaggtaactaccaagcgatcgacttatcacagtggattgcaggtaatcccgcggatgttcttgccacgaacttctccaaacccaccagcctctttgaaaagttcccaaaacaggacgtgtttattgctcctggcaag

SEQ ID NO: 1190 - protein, 359 aa, synthetic construct
  REGION 1..359: note = Variant of oxalate decarboxylase from Gemmata sp. SH-PL17
MGDPTFMNNVPDPLLSGKDLPTFKFELEKSKGKVIGGSSGKEATVVQLPISKGIAGVSMVLEPGAMRELHWHATAAEWGFVLWGHVRTTVIDPQGLAETNDFGPGDVWYFPRGHGHMLECLGDKPAHFILIFDNGYFSEFGTFSITDWIGHTPKALLAKNFKLPESAFDGFPKQEVYFARGAVPPATPAAPLQGLKLPPLTHKYELLEQEPHKVFKGGREWRVDSTRFPISKTVTGVVLDLEPGALRELHWHPNADEWQYVIDGNISVTMFGSHGRVRTEQMEKGDVGYIPQGYGHSIENVGDRPCRVLIGFNTGNYQAIDLSQWIAGNPADVLATNFSKPTSLFEKFPKQDVFIAPGK

SEQ ID NO: 1191 - DNA, 1077 bp, synthetic construct
  misc_feature 1..1077: note = Variant of oxalate decarboxylase from Gemmata sp. SH-PL17
  source 1..1077: mol_type = other DNA
atgggtgaccctacctttatgaacaatgtaccagaccctctgctgtcgggcaaagatttgccgacgttcaagtttgagctggaaaagagcaagggcaaagtcattggggggagttcgggaaaagaagcaaccgttgtccagttacctatctccaaaggcattgctggtgtgagcatggtacttgaaccgggtgcgatgcgcgaattgcactggcatgccacagcagcagagtgggggttcgtattattgggccacgtccgtacgacggtgatcgatccacaaggtctggccgaaaccaacgactttggaccgggcgacgtgtggtattttcctcgcggtcatgggcacatgctggaatgcctgggcgataaaccggcgcatttcattctgatcttcgataacggctacttctcagagtttggcaccttctctattactgactggatcggtcacacaccgaaagcgcttctcgccaagaactttaagctgcccgaaagcgcttttgatgggtttcccaaaaaagaggtctattttgcacgtggcgcggttccaccagccacccctgcagcgcctttacagggactgaagctgccaccactcacgcataaatacgaactcctcgaacaagaacctcataaagtttttaaaggtggtcgtgaatggcgcgtggatagcactcgttttcccatttccaagactgtaaccggcgttgttcttgatttggaacccggcgcgttacgcgagcttcactggcatcctaatgctgacgagtggcaatatgtgatcgatggcaacattagtgtgacgatgttcggttctcatggccgtgtacgcaccgaacagatggagaagggtgatgtcgggtatattccacaggggtatggccacagcatcgaaaatgttggagatcgtccttgtcgcgtcttgattggctttaacacaggtaactaccaagcgatcgacttatcacagtggattgcaggtaatcccgcggatgttcttgccacgaacttctccaaacccaccagcctctttgaaaagttcccaaaacaggacgtgtttattgctcctggcaag

SEQ ID NO: 1192 - protein, 359 aa, synthetic construct
  REGION 1..359: note = Variant of oxalate decarboxylase from Gemmata sp. SH-PL17
MGDPTFMNNVPDPLLSGKDLPTFKFELEKSKGKVIGGSSGKEATVVQLPISKGIAGVSMVLEPGAMRELHWHATAAEWGFVLLGHVRTTVIDPQGLAETNDFGPGDVWYFPRGHGHMLECLGDKPAHFILIFDNGYFSEFGTFSITDWIGHTPKALLAKNFKLPESAFDGFPKKEVYFARGAVPPATPAAPLQGLKLPPLTHKYELLEQEPHKVFKGGREWRVDSTRFPISKTVTGVVLDLEPGALRELHWHPNADEWQYVIDGNISVTMFGSHGRVRTEQMEKGDVGYIPQGYGHSIENVGDRPCRVLIGFNTGNYQAIDLSQWIAGNPADVLATNFSKPTSLFEKFPKQDVFIAPGK

SEQ ID NO: 1193 - DNA, 1077 bp, synthetic construct
  misc_feature 1..1077: note = Variant of oxalate decarboxylase from Gemmata sp. SH-PL17
  source 1..1077: mol_type = other DNA
atgggtgaccctacctttatgaacaatgtaccagaccctctgctgtcgggcaaagatttgccgacgttcaagtttgagctggaaaagagcaagggcaaagtcattggggggagttcgggaaaagaagcaaccgttgtccagttacctatctccaaaggcattgctggtgtgagcatggtacttgaaccgggtgcgatgcgcgaattgcactggcatgccacagcagcagagtgggggttcgtattatggggccacgtccgtacgacggtgatcgatccacaaggtattgccgaaaccaacgactttggaccgggcgacgtgtggtattttcctcgcggtcatgggcacatgctggaatgcctgggcgataaaccggcgcatttcattctgatcttcgataacggctacttctcagagtttggcaccttctctattactgactggatcggtcacacaccgaaagcgcttctcgccaagaactttaagctgcccgaaagcgcttttgatgggtttcccaaaaaagaggtctattttgcacgtggcgcggttccaccagccacccctgcagcgcctttacagggactgaagctgccaccactcacgcataaatacgaactcctcgaacaagaacctcataaagtttttaaaggtggtcgtgaatggcgcgtggatagcactcgttttcccatttccaagactgtaaccggcgttgttcttgatttggaacccggcgcgttacgcgagcttcactggcatcctaatgctgacgagtggcaatatgtgatcgatggcaacattagtgtgacgatgttcggttctcatggccgtgtacgcaccgaacagatggagaagggtgatgtcgggtatattccacaggggtatggccacagcatcgaaaatgttggagatcgtccttgtcgcgtcttgattggctttaacacaggtaactaccaagcgatcgacttatcacagtggattgcaggtaatcccgcggatgttcttgccacgaacttctccaaacccaccagcctctttgaaaagttcccaaaacaggacgtgtttattgctcctggcaag

SEQ ID NO: 1194 - protein, 359 aa, synthetic construct
  REGION 1..359: note = Variant of oxalate decarboxylase from Gemmata sp. SH-PL17
MGDPTFMNNVPDPLLSGKDLPTFKFELEKSKGKVIGGSSGKEATVVQLPISKGIAGVSMVLEPGAMRELHWHATAAEWGFVLWGHVRTTVIDPQGIAETNDFGPGDVWYFPRGHGHMLECLGDKPAHFILIFDNGYFSEFGTFSITDWIGHTPKALLAKNFKLPESAFDGFPKKEVYFARGAVPPATPAAPLQGLKLPPLTHKYELLEQEPHKVFKGGREWRVDSTRFPISKTVTGVVLDLEPGALRELHWHPNADEWQYVIDGNISVTMFGSHGRVRTEQMEKGDVGYIPQGYGHSIENVGDRPCRVLIGFNTGNYQAIDLSQWIAGNPADVLATNFSKPTSLFEKFPKQDVFIAPGK

SEQ ID NO: 1195 - DNA, 1077 bp, synthetic construct
  misc_feature 1..1077: note = Variant of oxalate decarboxylase from Gemmata sp. SH-PL17
  source 1..1077: mol_type = other DNA
atgggtgaccctacctttatgaacaatgtaccagactgtctgctgtcgggcaaagatttgccgacgttcaagtttgagctggaaaagagcaagggcaaagtcattggggggagttcgggaaaagaagcaaccgttgtccagttacctatctccaaaggcattgctggtgtgagcatggtacttgaaccgggtgcgatgcgcgaattgcactggcatgccacagcagcagagtgggggttcgtattatggggccacgtccgtacgacggtgatcgatccacaaggtctggccgaaaccaacgactttggaccgggcgacgtgtggtattttcctcgcggtcatgggcacatgctggaatgcctgggcgataaaccggcgcatttcattctgatcttcgataacggctacttctcagagtttggcaccttctctattactgactggatcggtcacacaccgaaagcgcttctcgccaagaactttaagctgcccgaaagcgcttttgatgggtttcccaaaaaagaggtctattttgcacgtggcgcggttccaccagccacccctgcagcgcctttacagggactgaagctgccaccactcacgcataaatacgaactcctcgaacaagaacctcataaagtttttaaaggtggtcgtgaatggcgcgtggatagcactcgttttcccatttccaagactgtaaccggcgttgttcttgatttggaacccggcgcgttacgcgagcttcactggcatcctaatgctgacgagtggcaatatgtgatcgatggcaacattagtgtgacgatgttcggttctcatggccgtgtacgcaccgaacagatggagaagggtgatgtcgggtatattccacaggggtatggccacagcatcgaaaatgttggagatcgtccttgtcgcgtcttgattggctttaacacaggtaactaccaagcgatcgacttatcacagtggattgcaggtaatcccgcggatgttcttgccacgaacttctccaaacccaccagcctctttgaaaagttcccaaaacaggacgtgtttattgctcctggcaag

SEQ ID NO: 1196 - protein, 359 aa, synthetic construct
  REGION 1..359: note = Variant of oxalate decarboxylase from Gemmata sp. SH-PL17
MGDPTFMNNVPDCLLSGKDLPTFKFELEKSKGKVIGGSSGKEATVVQLPISKGIAGVSMVLEPGAMRELHWHATAAEWGFVLWGHVRTTVIDPQGLAETNDFGPGDVWYFPRGHGHMLECLGDKPAHFILIFDNGYFSEFGTFSITDWIGHTPKALLAKNFKLPESAFDGFPKKEVYFARGAVPPATPAAPLQGLKLPPLTHKYELLEQEPHKVFKGGREWRVDSTRFPISKTVTGVVLDLEPGALRELHWHPNADEWQYVIDGNISVTMFGSHGRVRTEQMEKGDVGYIPQGYGHSIENVGDRPCRVLIGFNTGNYQAIDLSQWIAGNPADVLATNFSKPTSLFEKFPKQDVFIAPGK

SEQ ID NO: 1197 - DNA, 1077 bp, synthetic construct
  misc_feature 1..1077: note = Variant of oxalate decarboxylase from Gemmata sp. SH-PL17
  source 1..1077: mol_type = other DNA
atgggtgaccctacctttatgaacaatgtaccagacgcgctgctgtcgggcaaagatttgccgacgttcaagtttgagctggaaaagagcaagggcaaagtcattggggggagttcgggaaaagaagcaaccgttgtccagttacctatctccaaaggcattgctggtgtgagcatggtacttgaaccgggtgcgatgcgcgaattgcactggcatgccacagcagcagagtgggggttcgtattatggggccacgtccgtacgacggtgatcgatccacaaggtctggccgaaaccaacgactttggaccgggcgacgtgtggtattttcctcgcggtcatgggcacatgctggaatgcctgggcgataaaccggcgcatttcattctgatcttcgataacggctacttctcagagtttggcaccttctctattactgactggatcggtcacacaccgaaagcgcttctcgccaagaactttaagctgcccgaaagcgcttttgatgggtttcccaaaaaagaggtctattttgcacgtggcgcggttccaccagccacccctgcagcgcctttacagggactgaagctgccaccactcacgcataaatacgaactcctcgaacaagaacctcataaagtttttaaaggtggtcgtgaatggcgcgtggatagcactcgttttcccatttccaagactgtaaccggcgttgttcttgatttggaacccggcgcgttacgcgagcttcactggcatcctaatgctgacgagtggcaatatgtgatcgatggcaacattagtgtgacgatgttcggttctcatggccgtgtacgcaccgaacagatggagaagggtgatgtcgggtatattccacaggggtatggccacagcatcgaaaatgttggagatcgtccttgtcgcgtcttgattggctttaacacaggtaactaccaagcgatcgacttatcacagtggattgcaggtaatcccgcggatgttcttgccacgaacttctccaaacccaccagcctctttgaaaagttcccaaaacaggacgtgtttattgctcctggcaag

SEQ ID NO: 1198 - protein, 359 aa, synthetic construct
  REGION 1..359: note = Variant of oxalate decarboxylase from Gemmata sp. SH-PL17
MGDPTFMNNVPDALLSGKDLPTFKFELEKSKGKVIGGSSGKEATVVQLPISKGIAGVSMVLEPGAMRELHWHATAAEWGFVLWGHVRTTVIDPQGLAETNDFGPGDVWYFPRGHGHMLECLGDKPAHFILIFDNGYFSEFGTFSITDWIGHTPKALLAKNFKLPESAFDGFPKKEVYFARGAVPPATPAAPLQGLKLPPLTHKYELLEQEPHKVFKGGREWRVDSTRFPISKTVTGVVLDLEPGALRELHWHPNADEWQYVIDGNISVTMFGSHGRVRTEQMEKGDVGYIPQGYGHSIENVGDRPCRVLIGFNTGNYQAIDLSQWIAGNPADVLATNFSKPTSLFEKFPKQDVFIAPGK

SEQ ID NO: 1199 - DNA, 1077 bp, synthetic construct
  misc_feature 1..1077: note = Variant of oxalate decarboxylase from Gemmata sp. SH-PL17
  source 1..1077: mol_type = other DNA
atgggtgaccctacctttatgaacaatgtaccagaccctctgctgtcgggcaaagatttgccgacgttcaagtttgagctggaaaagagcaagggcaaagtcattggggggagttcgggaaaagaagcaaccgttgtccagttacctatctccaaaggcattgctggtgtgagcatggtacttgaaccgggtgcgatgcgcgaattgcactggcatgccacagcagcagagtgggggttcgtattatggggccacgtccgtacgacggtgatcgatccacaaggtcaggccgaaaccaacgactttggaccgggcgacgtgtggtattttcctcgcggtcatgggcacatgctggaatgcctgggcgataaaccggcgcatttcattctgatcttcgataacggctacttctcagagtttggcaccttctctattactgactggatcggtcacacaccgaaagcgcttctcgccaagaactttaagctgcccgaaagcgcttttgatgggtttcccaaaaaagaggtctattttgcacgtggcgcggttccaccagccacccctgcagcgcctttacagggactgaagctgccaccactcacgcataaatacgaactcctcgaacaagaacctcataaagtttttaaaggtggtcgtgaatggcgcgtggatagcactcgttttcccatttccaagactgtaaccggcgttgttcttgatttggaacccggcgcgttacgcgagcttcactggcatcctaatgctgacgagtggcaatatgtgatcgatggcaacattagtgtgacgatgttcggttctcatggccgtgtacgcaccgaacagatggagaagggtgatgtcgggtatattccacaggggtatggccacagcatcgaaaatgttggagatcgtccttgtcgcgtcttgattggctttaacacaggtaactaccaagcgatcgacttatcacagtggattgcaggtaatcccgcggatgttcttgccacgaacttctccaaacccaccagcctctttgaaaagttcccaaaacaggacgtgtttattgctcctggcaag

SEQ ID NO: 1200 - protein, 359 aa, synthetic construct
  REGION 1..359: note = Variant of oxalate decarboxylase from Gemmata sp. SH-PL17
MGDPTFMNNVPDPLLSGKDLPTFKFELEKSKGKVIGGSSGKEATVVQLPISKGIAGVSMVLEPGAMRELHWHATAAEWGFVLWGHVRTTVIDPQGQAETNDFGPGDVWYFPRGHGHMLECLGDKPAHFILIFDNGYFSEFGTFSITDWIGHTPKALLAKNFKLPESAFDGFPKKEVYFARGAVPPATPAAPLQGLKLPPLTHKYELLEQEPHKVFKGGREWRVDSTRFPISKTVTGVVLDLEPGALRELHWHPNADEWQYVIDGNISVTMFGSHGRVRTEQMEKGDVGYIPQGYGHSIENVGDRPCRVLIGFNTGNYQAIDLSQWIAGNPADVLATNFSKPTSLFEKFPKQDVFIAPGK

SEQ ID NO: 1201 - DNA, 1077 bp, synthetic construct
  misc_feature 1..1077: note = Variant of oxalate decarboxylase from Gemmata sp. SH-PL17
  source 1..1077: mol_type = other DNA
atgggtgaccctacctttatgaacaatgtaccagaccatctgctgtcgggcaaagatttgccgacgttcaagtttgagctggaaaagagcaagggcaaagtcattggggggagttcgggaaaagaagcaaccgttgtccagttacctatctccaaaggcattgctggtgtgagcatggtacttgaaccgggtgcgatgcgcgaattgcactggcatgccacagcagcagagtgggggttcgtattatggggccacgtccgtacgacggtgatcgatccacaaggtctggccgaaaccaacgactttggaccgggcgacgtgtggtattttcctcgcggtcatgggcacatgctggaatgcctgggcgataaaccggcgcatttcattctgatcttcgataacggctacttctcagagtttggcaccttctctattactgactggatcggtcacacaccgaaagcgcttctcgccaagaactttaagctgcccgaaagcgcttttgatgggtttcccaaaaaagaggtctattttgcacgtggcgcggttccaccagccacccctgcagcgcctttacagggactgaagctgccaccactcacgcataaatacgaactcctcgaacaagaacctcataaagtttttaaaggtggtcgtgaatggcgcgtggatagcactcgttttcccatttccaagactgtaaccggcgttgttcttgatttggaacccggcgcgttacgcgagcttcactggcatcctaatgctgacgagtggcaatatgtgatcgatggcaacattagtgtgacgatgttcggttctcatggccgtgtacgcaccgaacagatggagaagggtgatgtcgggtatattccacaggggtatggccacagcatcgaaaatgttggagatcgtccttgtcgcgtcttgattggctttaacacaggtaactaccaagcgatcgacttatcacagtggattgcaggtaatcccgcggatgttcttgccacgaacttctccaaacccaccagcctctttgaaaagttcccaaaacaggacgtgtttattgctcctggcaag

SEQ ID NO: 1202 - protein, 359 aa, synthetic construct
  REGION 1..359: note = Variant of oxalate decarboxylase from Gemmata sp. SH-PL17
MGDPTFMNNVPDHLLSGKDLPTFKFELEKSKGKVIGGSSGKEATVVQLPISKGIAGVSMVLEPGAMRELHWHATAAEWGFVLWGHVRTTVIDPQGLAETNDFGPGDVWYFPRGHGHMLECLGDKPAHFILIFDNGYFSEFGTFSITDWIGHTPKALLAKNFKLPESAFDGFPKKEVYFARGAVPPATPAAPLQGLKLPPLTHKYELLEQEPHKVFKGGREWRVDSTRFPISKTVTGVVLDLEPGALRELHWHPNADEWQYVIDGNISVTMFGSHGRVRTEQMEKGDVGYIPQGYGHSIENVGDRPCRVLIGFNTGNYQAIDLSQWIAGNPADVLATNFSKPTSLFEKFPKQDVFIAPGK

SEQ ID NO: 1203 - DNA, 1077 bp, synthetic construct
  misc_feature 1..1077: note = Variant of oxalate decarboxylase from Gemmata sp. SH-PL17
  source 1..1077: mol_type = other DNA
atgggtgaccctacctttatgaacaatgtaccagaccctctgctgtcgggcaaagatttgccgacgttcaagtttgagctggaaaagagcaagggcaaagtcattggggggagttcgggaaaagaagcaaccgttgtccagttacctatctccaaaggcattgctggtgtgagcatggtacttgaaccgggtgcgatgcgcgaattgcactggcatgccacagcagcagagtgggggttcgtattaacgggccacgtccgtacgacggtgatcgatccacaaggtctggccgaaaccaacgactttggaccgggcgacgtgtggtattttcctcgcggtcatgggcacatgctggaatgcctgggcgataaaccggcgcatttcattctgatcttcgataacggctacttctcagagtttggcaccttctctattactgactggatcggtcacacaccgaaagcgcttctcgccaagaactttaagctgcccgaaagcgcttttgatgggtttcccaaaaaagaggtctattttgcacgtggcgcggttccaccagccacccctgcagcgcctttacagggactgaagctgccaccactcacgcataaatacgaactcctcgaacaagaacctcataaagtttttaaaggtggtcgtgaatggcgcgtggatagcactcgttttcccatttccaagactgtaaccggcgttgttcttgatttggaacccggcgcgttacgcgagcttcactggcatcctaatgctgacgagtggcaatatgtgatcgatggcaacattagtgtgacgatgttcggttctcatggccgtgtacgcaccgaacagatggagaagggtgatgtcgggtatattccacaggggtatggccacagcatcgaaaatgttggagatcgtccttgtcgcgtcttgattggctttaacacaggtaactaccaagcgatcgacttatcacagtggattgcaggtaatcccgcggatgttcttgccacgaacttctccaaacccaccagcctctttgaaaagttcccaaaacaggacgtgtttattgctcctggcaag

SEQ ID NO: 1204 - protein, 359 aa, synthetic construct
  REGION 1..359: note = Variant of oxalate decarboxylase from Gemmata sp. SH-PL17
MGDPTFMNNVPDPLLSGKDLPTFKFELEKSKGKVIGGSSGKEATVVQLPISKGIAGVSMVLEPGAMRELHWHATAAEWGFVLTGHVRTTVIDPQGLAETNDFGPGDVWYFPRGHGHMLECLGDKPAHFILIFDNGYFSEFGTFSITDWIGHTPKALLAKNFKLPESAFDGFPKKEVYFARGAVPPATPAAPLQGLKLPPLTHKYELLEQEPHKVFKGGREWRVDSTRFPISKTVTGVVLDLEPGALRELHWHPNADEWQYVIDGNISVTMFGSHGRVRTEQMEKGDVGYIPQGYGHSIENVGDRPCRVLIGFNTGNYQAIDLSQWIAGNPADVLATNFSKPTSLFEKFPKQDVFIAPGK

SEQ ID NO: 1205 - DNA, 1077 bp, synthetic construct
  misc_feature 1..1077: note = Variant of oxalate decarboxylase from Gemmata sp. SH-PL17
  source 1..1077: mol_type = other DNA
atgggtgaccctacctttatgaacaatgtaccagaccctctgctgtcgggcaaagatttgccgacgttcaagtttgagctggaaaagagctatggcaaagtcattggggggagttcgggaaaagaagcaaccgttgtccagttacctatctccaaaggcattgctggtgtgagcatggtacttgaaccgggtgcgatgcgcgaattgcactggcatgccacagcagcagagtgggggttcgtattatggggccacgtccgtacgacggtgatcgatccacaaggtctggccgaaaccaacgactttggaccgggcgacgtgtggtattttcctcgcggtcatgggcacatgctggaatgcctgggcgataaaccggcgcatttcattctgatcttcgataacggctacttctcagagtttggcaccttctctattactgactggatcggtcacacaccgaaagcgcttctcgccaagaactttaagctgcccgaaagcgcttttgatgggtttcccaaaaaagaggtctattttgcacgtggcgcggttccaccagccacccctgcagcgcctttacagggactgaagctgccaccactcacgcataaatacgaactcctcgaacaagaacctcataaagtttttaaaggtggtcgtgaatggcgcgtggatagcactcgttttcccatttccaagactgtaaccggcgttgttcttgatttggaacccggcgcgttacgcgagcttcactggcatcctaatgctgacgagtggcaatatgtgatcgatggcaacattagtgtgacgatgttcggttctcatggccgtgtacgcaccgaacagatggagaagggtgatgtcgggtatattccacaggggtatggccacagcatcgaaaatgttggagatcgtccttgtcgcgtcttgattggctttaacacaggtaactaccaagcgatcgacttatcacagtggattgcaggtaatcccgcggatgttcttgccacgaacttctccaaacccaccagcctctttgaaaagttcccaaaacaggacgtgtttattgctcctggcaag

SEQ ID NO: 1206 - protein, 359 aa, synthetic construct
  REGION 1..359: note = Variant of oxalate decarboxylase from Gemmata sp. SH-PL17
MGDPTFMNNVPDPLLSGKDLPTFKFELEKSYGKVIGGSSGKEATVVQLPISKGIAGVSMVLEPGAMRELHWHATAAEWGFVLWGHVRTTVIDPQGLAETNDFGPGDVWYFPRGHGHMLECLGDKPAHFILIFDNGYFSEFGTFSITDWIGHTPKALLAKNFKLPESAFDGFPKKEVYFARGAVPPATPAAPLQGLKLPPLTHKYELLEQEPHKVFKGGREWRVDSTRFPISKTVTGVVLDLEPGALRELHWHPNADEWQYVIDGNISVTMFGSHGRVRTEQMEKGDVGYIPQGYGHSIENVGDRPCRVLIGFNTGNYQAIDLSQWIAGNPADVLATNFSKPTSLFEKFPKQDVFIAPGK

SEQ ID NO: 1207 - DNA, 1077 bp, synthetic construct
  misc_feature 1..1077: note = Variant of oxalate decarboxylase from Gemmata sp. SH-PL17
  source 1..1077: mol_type = other DNA
atgggtgaccctacctttatgaacaatgtaccagactggctgctgtcgggcaaagatttgccgacgttcaagtttgagctggaaaagagcaagggcaaagtcattggggggagttcgggaaaagaagcaaccgttgtccagttacctatctccaaaggcattgctggtgtgagcatggtacttgaaccgggtgcgatgcgcgaattgcactggcatgccacagcagcagagtgggggttcgtattatggggccacgtccgtacgacggtgatcgatccacaaggtctggccgaaaccaacgactttggaccgggcgacgtgtggtattttcctcgcggtcatgggcacatgctggaatgcctgggcgataaaccggcgcatttcattctgatcttcgataacggctacttctcagagtttggcaccttctctattactgactggatcggtcacacaccgaaagcgcttctcgccaagaactttaagctgcccgaaagcgcttttgatgggtttcccaaaaaagaggtctattttgcacgtggcgcggttccaccagccacccctgcagcgcctttacagggactgaagctgccaccactcacgcataaatacgaactcctcgaacaagaacctcataaagtttttaaaggtggtcgtgaatggcgcgtggatagcactcgttttcccatttccaagactgtaaccggcgttgttcttgatttggaacccggcgcgttacgcgagcttcactggcatcctaatgctgacgagtggcaatatgtgatcgatggcaacattagtgtgacgatgttcggttctcatggccgtgtacgcaccgaacagatggagaagggtgatgtcgggtatattccacaggggtatggccacagcatcgaaaatgttggagatcgtccttgtcgcgtcttgattggctttaacacaggtaactaccaagcgatcgacttatcacagtggattgcaggtaatcccgcggatgttcttgccacgaacttctccaaacccaccagcctctttgaaaagttcccaaaacaggacgtgtttattgctcctggcaag

SEQ ID NO: 1208 - protein, 359 aa, synthetic construct
  REGION 1..359: note = Variant of oxalate decarboxylase from Gemmata sp. SH-PL17
MGDPTFMNNVPDWLLSGKDLPTFKFELEKSKGKVIGGSSGKEATVVQLPISKGIAGVSMVLEPGAMRELHWHATAAEWGFVLWGHVRTTVIDPQGLAETNDFGPGDVWYFPRGHGHMLECLGDKPAHFILIFDNGYFSEFGTFSITDWIGHTPKALLAKNFKLPESAFDGFPKKEVYFARGAVPPATPAAPLQGLKLPPLTHKYELLEQEPHKVFKGGREWRVDSTRFPISKTVTGVVLDLEPGALRELHWHPNADEWQYVIDGNISVTMFGSHGRVRTEQMEKGDVGYIPQGYGHSIENVGDRPCRVLIGFNTGNYQAIDLSQWIAGNPADVLATNFSKPTSLFEKFPKQDVFIAPGK

SEQ ID NO: 1209 - DNA, 1077 bp, synthetic construct
  misc_feature 1..1077: note = Variant of oxalate decarboxylase from Gemmata sp. SH-PL17
  source 1..1077: mol_type = other DNA
atgggtgaccctacctttatgaacaatgtaccagaccctctgctgtcgggcaaagatttgccgacgttcaagtttgagctggaaaagagcaagggcaaagtcattggggggagttcgggaaaagaagcaaccgttgtccagttacctatctccaaaggcattgctggtgtgagcatggtacttgaaccgggtgcgatgcgcgaattgcactggcatgccacagcagcagagtgggggttcgtattatggggccacgtccgtacgacggtgatcgatccacaaggtctggccgaaaccaacgactttggaccgggcgacgtgtggtattttcctcgcggtcatgggcacatgctggaatgcctgggcgataaaccggcgcatttcattctgatcttcgataacggctacttctcagagtttggcaccttctctattactgactggatcggtcacacaccgaaagcgcttctcgccaagaactttaagctgcccgaaagcgcttttgatgggtttcccaaaaaagaggtctattttgcacgtggcgcggttccaccagccacccctgcagcgcctttacagggactgaagctgccaccactcacgcataaatacgaactcctcgaacaagaacctcataaagtttttaaaggtggtcgtgaatggcgcgtggatagcactcgttttcccatttccaagactgtaaccggcgttgttcttgatttggaacccggcgcgttacgcgagcttcactggcatcctaatgctgacgagtggcaatatgtgatcgatggcaacattagtgtgacgatgttcggttctcatggccgtccgcgcaccgaacagatggagaagggtgatgtcgggtatattccacaggggtatggccacagcatcgaaaatgttggagatcgtccttgtcgcgtcttgattggctttaacacaggtaactaccaagcgatcgacttatcacagtggattgcaggtaatcccgcggatgttcttgccacgaacttctccaaacccaccagcctctttgaaaagttcccaaaacaggacgtgtttattgctcctggcaag

SEQ ID NO: 1210 - protein, 359 aa, synthetic construct
  REGION 1..359: note = Variant of oxalate decarboxylase from Gemmata sp. SH-PL17
MGDPTFMNNVPDPLLSGKDLPTFKFELEKSKGKVIGGSSGKEATVVQLPISKGIAGVSMVLEPGAMRELHWHATAAEWGFVLWGHVRTTVIDPQGLAETNDFGPGDVWYFPRGHGHMLECLGDKPAHFILIFDNGYFSEFGTFSITDWIGHTPKALLAKNFKLPESAFDGFPKKEVYFARGAVPPATPAAPLQGLKLPPLTHKYELLEQEPHKVFKGGREWRVDSTRFPISKTVTGVVLDLEPGALRELHWHPNADEWQYVIDGNISVTMFGSHGRPRTEQMEKGDVGYIPQGYGHSIENVGDRPCRVLIGFNTGNYQAIDLSQWIAGNPADVLATNFSKPTSLFEKFPKQDVFIAPGK

SEQ ID NO: 1211 - DNA, 1077 bp, synthetic construct
  misc_feature 1..1077: note = Variant of oxalate decarboxylase from Gemmata sp. SH-PL17
  source 1..1077: mol_type = other DNA
atgggtgaccctacctttatgaacaatgtaccagaccctctgctgtcgggcaaagatttgccgacgttcaagtttgagctggaaaagagcaagggcaaagtcattggggggagttcgggaaaagaagcaaccgttgtccagttacctatctccaaaggcattgctggtgtgagcatggtacttgaaccgggtgcgatgcgcgaattgcactggcatgccacagcagcagagtgggggttcgtattatggggccacgtccgtacgacggtgatcgatccacaaggtctggccgaaaccaacgactttggaccgggcgacgtgtggtattttcctcgcggtcatgggcacatgctggaatgcctgggcgataaaccggcgcatttcattctgatcttcgataacggctacttctcagagtttggcaccttctctattactgactggatcggtcacacaccgaaagcgcttctcgccaagaactttaagctgcccgaaagcgcttttgatgggtttcccaaaaaagaggtctattttgcacgtggcgcggttccaccagccacccctgcagcgcctttacagggaacgaagctgccaccactcacgcataaatacgaactcctcgaacaagaacctcataaagtttttaaaggtggtcgtgaatggcgcgtggatagcactcgttttcccatttccaagactgtaaccggcgttgttcttgatttggaacccggcgcgttacgcgagcttcactggcatcctaatgctgacgagtggcaatatgtgatcgatggcaacattagtgtgacgatgttcggttctcatggccgtgtacgcaccgaacagatggagaagggtgatgtcgggtatattccacaggggtatggccacagcatcgaaaatgttggagatcgtccttgtcgcgtcttgattggctttaacacaggtaactaccaagcgatcgacttatcacagtggattgcaggtaatcccgcggatgttcttgccacgaacttctccaaacccaccagcctctttgaaaagttcccaaaacaggacgtgtttattgctcctggcaag

SEQ ID NO: 1212 - protein, 359 aa, synthetic construct
  REGION 1..359: note = Variant of oxalate decarboxylase from Gemmata sp. SH-PL17
MGDPTFMNNVPDPLLSGKDLPTFKFELEKSKGKVIGGSSGKEATVVQLPISKGIAGVSMVLEPGAMRELHWHATAAEWGFVLWGHVRTTVIDPQGLAETNDFGPGDVWYFPRGHGHMLECLGDKPAHFILIFDNGYFSEFGTFSITDWIGHTPKALLAKNFKLPESAFDGFPKKEVYFARGAVPPATPAAPLQGTKLPPLTHKYELLEQEPHKVFKGGREWRVDSTRFPISKTVTGVVLDLEPGALRELHWHPNADEWQYVIDGNISVTMFGSHGRVRTEQMEKGDVGYIPQGYGHSIENVGDRPCRVLIGFNTGNYQAIDLSQWIAGNPADVLATNFSKPTSLFEKFPKQDVFIAPGK

SEQ ID NO: 1213 - DNA, 1077 bp, synthetic construct
  misc_feature 1..1077: note = Variant of oxalate decarboxylase from Gemmata sp. SH-PL17
  source 1..1077: mol_type = other DNA
atgggtgaccctacctttatgaacaatgtaccagaccctctgctgtcgggcaaagatttgccgacgttcaagtttgagctggaaaagagcaagggcaaagtcattggggggagttcgggaaaagaagcaaccgttgtccagttacctatctccaaaggcattgctggtgtgagcatgagtcttgaaccgggtgcgatgcgcgaattgcactggcatgccacagcagcagagtgggggttcgtattatggggccacgtccgtacgacggtgatcgatccacaaggtctggccgaaaccaacgactttggaccgggcgacgtgtggtattttcctcgcggtcatgggcacatgctggaatgcctgggcgataaaccggcgcatttcattctgatcttcgataacggctacttctcagagtttggcaccttctctattactgactggatcggtcacacaccgaaagcgcttctcgccaagaactttaagctgcccgaaagcgcttttgatgggtttcccaaaaaagaggtctattttgcacgtggcgcggttccaccagccacccctgcagcgcctttacagggactgaagctgccaccactcacgcataaatacgaactcctcgaacaagaacctcataaagtttttaaaggtggtcgtgaatggcgcgtggatagcactcgttttcccatttccaagactgtaaccggcgttgttcttgatttggaacccggcgcgttacgcgagcttcactggcatcctaatgctgacgagtggcaatatgtgatcgatggcaacattagtgtgacgatgttcggttctcatggccgtgtacgcaccgaacagatggagaagggtgatgtcgggtatattccacaggggtatggccacagcatcgaaaatgttggagatcgtccttgtcgcgtcttgattggctttaacacaggtaactaccaagcgatcgacttatcacagtggattgcaggtaatcccgcggatgttcttgccacgaacttctccaaacccaccagcctctttgaaaagttcccaaaacaggacgtgtttattgctcctggcaag

SEQ ID NO: 1214 - protein, 359 aa, synthetic construct
  REGION 1..359: note = Variant of oxalate decarboxylase from Gemmata sp. SH-PL17
MGDPTFMNNVPDPLLSGKDLPTFKFELEKSKGKVIGGSSGKEATVVQLPISKGIAGVSMSLEPGAMRELHWHATAAEWGFVLWGHVRTTVIDPQGLAETNDFGPGDVWYFPRGHGHMLECLGDKPAHFILIFDNGYFSEFGTFSITDWIGHTPKALLAKNFKLPESAFDGFPKKEVYFARGAVPPATPAAPLQGLKLPPLTHKYELLEQEPHKVFKGGREWRVDSTRFPISKTVTGVVLDLEPGALRELHWHPNADEWQYVIDGNISVTMFGSHGRVRTEQMEKGDVGYIPQGYGHSIENVGDRPCRVLIGFNTGNYQAIDLSQWIAGNPADVLATNFSKPTSLFEKFPKQDVFIAPGK

SEQ ID NO: 1215 - DNA, 1077 bp, synthetic construct
  misc_feature 1..1077: note = Variant of oxalate decarboxylase from Gemmata sp. SH-PL17
  source 1..1077: mol_type = other DNA
atgggtgaccctacctttatgaacaatgtaccagaccctctgctgtcgggcaaagatttgccgacgttcaagtttcagctggaaaagagcaagggcaaagtcattggggggagttcgggaaaagaagcaaccgttgtccagttacctatctccaaaggcattgctggtgtgagcatggtacttgaaccgggtgcgatgcgcgaattgcactggcatgccacagcagcagagtgggggttcgtattatggggccacgtccgtacgacggtgatcgatccacaaggtctggccgaaaccaacgactttggaccgggcgacgtgtggtattttcctcgcggtcatgggcacatgctggaatgcctgggcgataaaccggcgcatttcattctgatcttcgataacggctacttctcagagtttggcaccttctctattactgactggatcggtcacacaccgaaagcgcttctcgccaagaactttaagctgcccgaaagcgcttttgatgggtttcccaaaaaagaggtctattttgcacgtggcgcggttccaccagccacccctgcagcgcctttacagggactgaagctgccaccactcacgcataaatacgaactcctcgaacaagaacctcataaagtttttaaaggtggtcgtgaatggcgcgtggatagcactcgttttcccatttccaagactgtaaccggcgttgttcttgatttggaacccggcgcgttacgcgagcttcactggcatcctaatgctgacgagtggcaatatgtgatcgatggcaacattagtgtgacgatgttcggttctcatggccgtgtacgcaccgaacagatggagaagggtgatgtcgggtatattccacaggggtatggccacagcatcgaaaatgttggagatcgtccttgtcgcgtcttgattggctttaacacaggtaactaccaagcgatcgacttatcacagtggattgcaggtaatcccgcggatgttcttgccacgaacttctccaaacccaccagcctctttgaaaagttcccaaaacaggacgtgtttattgctcctggcaag

SEQ ID NO: 1216 - protein, 359 aa, synthetic construct
  REGION 1..359: note = Variant of oxalate decarboxylase from Gemmata sp. SH-PL17
MGDPTFMNNVPDPLLSGKDLPTFKFQLEKSKGKVIGGSSGKEATVVQLPISKGIAGVSMVLEPGAMRELHWHATAAEWGFVLWGHVRTTVIDPQGLAETNDFGPGDVWYFPRGHGHMLECLGDKPAHFILIFDNGYFSEFGTFSITDWIGHTPKALLAKNFKLPESAFDGFPKKEVYFARGAVPPATPAAPLQGLKLPPLTHKYELLEQEPHKVFKGGREWRVDSTRFPISKTVTGVVLDLEPGALRELHWHPNADEWQYVIDGNISVTMFGSHGRVRTEQMEKGDVGYIPQGYGHSIENVGDRPCRVLIGFNTGNYQAIDLSQWIAGNPADVLATNFSKPTSLFEKFPKQDVFIAPGK

SEQ ID NO: 1217 - DNA, 1077 bp, synthetic construct
  misc_feature 1..1077: note = Variant of oxalate decarboxylase from Gemmata sp. SH-PL17
  source 1..1077: mol_type = other DNA
atgggtgaccctacctttatgaacaatgtaccagaccctctgctgtcgggcaaagatttgccgacgttcaagtttgagctggaaaagagcaagggcaaagtcattggggggagttcgggaaaagaagcaaccgttgtccagttacctatctccaaaggcattgctggtgtgagcatggtacttgaaccgggtgcgatgcgcgaattgcactggcatgccacagcagcagagtgggggttcgtattatggggccacgtccgtacgacggtgatcgatccacaaggtctggccgaaaccaacgactttggaccgggcgacgtgtggtattttcctcgcggtcatgggcacatgctggaatgcctgggcgataaaccggcgcatttcattctgatcttcgataacggctacttctcagagtttggcaccttctctattactgactggatcggtcacacaccgaaagcgcttctcgccaagaactttaagctgcccgaaagcgcttttgatgggtttcccaaaaaagaggtctattttgcacgtggcgcggttccaccagccacccctgcagcgcctttacagggactgaagctgccaccactcacgcataaatacgaactcctcgaacaaccgcctcataaagtttttaaaggtggtcgtgaatggcgcgtggatagcactcgttttcccatttccaagactgtaaccggcgttgttcttgatttggaacccggcgcgttacgcgagcttcactggcatcctaatgctgacgagtggcaatatgtgatcgatggcaacattagtgtgacgatgttcggttctcatggccgtgtacgcaccgaacagatggagaagggtgatgtcgggtatattccacaggggtatggccacagcatcgaaaatgttggagatcgtccttgtcgcgtcttgattggctttaacacaggtaactaccaagcgatcgacttatcacagtggattgcaggtaatcccgcggatgttcttgccacgaacttctccaaacccaccagcctctttgaaaagttcccaaaacaggacgtgtttattgctcctggcaag

SEQ ID NO: 1218 - protein, 359 aa, synthetic construct
  REGION 1..359: note = Variant of oxalate decarboxylase from Gemmata sp. SH-PL17
MGDPTFMNNVPDPLLSGKDLPTFKFELEKSKGKVIGGSSGKEATVVQLPISKGIAGVSMVLEPGAMRELHWHATAAEWGFVLWGHVRTTVIDPQGLAETNDFGPGDVWYFPRGHGHMLECLGDKPAHFILIFDNGYFSEFGTFSITDWIGHTPKALLAKNFKLPESAFDGFPKKEVYFARGAVPPATPAAPLQGLKLPPLTHKYELLEQPPHKVFKGGREWRVDSTRFPISKTVTGVVLDLEPGALRELHWHPNADEWQYVIDGNISVTMFGSHGRVRTEQMEKGDVGYIPQGYGHSIENVGDRPCRVLIGFNTGNYQAIDLSQWIAGNPADVLATNFSKPTSLFEKFPKQDVFIAPGK

SEQ ID NO: 1219 - DNA, 1077 bp, synthetic construct
  misc_feature 1..1077: note = Variant of oxalate decarboxylase from Gemmata sp. SH-PL17
  source 1..1077: mol_type = other DNA
atgggtgaccctacctttatgaacaatgtaccagaccctctgctgtcgggcaaagatttgccgacgttcaagtttgagctggaaaagagcaagggcaaagtcattggggggagttcgggaaaagaagcaaccgttgtccagttacctatctccaaaggcattgctggtgtgagcatggtacttgaaccgggtgcgatgcgcgaattgcactggcatgccacagcagcagagtgggggttcgtattatggggccacgtccgtacgacggtgatcgatccacaaggtctggccgaaaccaacgactttggaccgggcgacgtgtggtattttcctcgcggtcatgggcacatgctggaatgcctgggcgataaaccggcgcatttcattctgatcttcgataacggctacttctcagagtttggcaccttctctattactgactggatcggtcacacaccgaaagcgcttctcgccaagaactttaagctgcccgaaagcgcttttgatgggtttcccaaaaatgaggtctattttgcacgtggcgcggttccaccagccacccctgcagcgcctttacagggactgaagctgccaccactcacgcataaatacgaactcctcgaacaagaacctcataaagtttttaaaggtggtcgtgaatggcgcgtggatagcactcgttttcccatttccaagactgtaaccggcgttgttcttgatttggaacccggcgcgttacgcgagcttcactggcatcctaatgctgacgagtggcaatatgtgatcgatggcaacattagtgtgacgatgttcggttctcatggccgtgtacgcaccgaacagatggagaagggtgatgtcgggtatattccacaggggtatggccacagcatcgaaaatgttggagatcgtccttgtcgcgtcttgattggctttaacacaggtaactaccaagcgatcgacttatcacagtggattgcaggtaatcccgcggatgttcttgccacgaacttctccaaacccaccagcctctttgaaaagttcccaaaacaggacgtgtttattgctcctggcaag

SEQ ID NO: 1220 - protein, 359 aa, synthetic construct
  REGION 1..359: note = Variant of oxalate decarboxylase from Gemmata sp. SH-PL17
MGDPTFMNNVPDPLLSGKDLPTFKFELEKSKGKVIGGSSGKEATVVQLPISKGIAGVSMVLEPGAMRELHWHATAAEWGFVLWGHVRTTVIDPQGLAETNDFGPGDVWYFPRGHGHMLECLGDKPAHFILIFDNGYFSEFGTFSITDWIGHTPKALLAKNFKLPESAFDGFPKNEVYFARGAVPPATPAAPLQGLKLPPLTHKYELLEQEPHKVFKGGREWRVDSTRFPISKTVTGVVLDLEPGALRELHWHPNADEWQYVIDGNISVTMFGSHGRVRTEQMEKGDVGYIPQGYGHSIENVGDRPCRVLIGFNTGNYQAIDLSQWIAGNPADVLATNFSKPTSLFEKFPKQDVFIAPGK

SEQ ID NO: 1221 - DNA, 1077 bp, synthetic construct
  misc_feature 1..1077: note = Variant of oxalate decarboxylase from Gemmata sp. SH-PL17
  source 1..1077: mol_type = other DNA
atgggtgaccctacctttatgaacaatgtaccagaccctctgctgtcgggcaaagatttgccgacgttcaagtttgagctggaaaagagcaagggcaaagtcattggggggagttcgggaaaagaagcaaccgttgtccagttacctatctccaaaggcattgctggtgtgagcatggtacttgaaccgggtgcgatgcgcgaattgcactggcatgccacagcagcagagtgggggttcgtattagcgggccacgtccgtacgacggtgatcgatccacaaggtctggccgaaaccaacgactttggaccgggcgacgtgtggtattttcctcgcggtcatgggcacatgctggaatgcctgggcgataaaccggcgcatttcattctgatcttcgataacggctacttctcagagtttggcaccttctctattactgactggatcggtcacacaccgaaagcgcttctcgccaagaactttaagctgcccgaaagcgcttttgatgggtttcccaaaaaagaggtctattttgcacgtggcgcggttccaccagccacccctgcagcgcctttacagggactgaagctgccaccactcacgcataaatacgaactcctcgaacaagaacctcataaagtttttaaaggtggtcgtgaatggcgcgtggatagcactcgttttcccatttccaagactgtaaccggcgttgttcttgatttggaacccggcgcgttacgcgagcttcactggcatcctaatgctgacgagtggcaatatgtgatcgatggcaacattagtgtgacgatgttcggttctcatggccgtgtacgcaccgaacagatggagaagggtgatgtcgggtatattccacaggggtatggccacagcatcgaaaatgttggagatcgtccttgtcgcgtcttgattggctttaacacaggtaactaccaagcgatcgacttatcacagtggattgcaggtaatcccgcggatgttcttgccacgaacttctccaaacccaccagcctctttgaaaagttcccaaaacaggacgtgtttattgctcctggcaag

SEQ ID NO: 1222 - protein, 359 aa, synthetic construct
  REGION 1..359: note = Variant of oxalate decarboxylase from Gemmata sp. SH-PL17
MGDPTFMNNVPDPLLSGKDLPTFKFELEKSKGKVIGGSSGKEATVVQLPISKGIAGVSMVLEPGAMRELHWHATAAEWGFVLAGHVRTTVIDPQGLAETNDFGPGDVWYFPRGHGHMLECLGDKPAHFILIFDNGYFSEFGTFSITDWIGHTPKALLAKNFKLPESAFDGFPKKEVYFARGAVPPATPAAPLQGLKLPPLTHKYELLEQEPHKVFKGGREWRVDSTRFPISKTVTGVVLDLEPGALRELHWHPNADEWQYVIDGNISVTMFGSHGRVRTEQMEKGDVGYIPQGYGHSIENVGDRPCRVLIGFNTGNYQAIDLSQWIAGNPADVLATNFSKPTSLFEKFPKQDVFIAPGK

SEQ ID NO: 1223 - DNA, 1077 bp, synthetic construct
  misc_feature 1..1077: note = Variant of oxalate decarboxylase from Gemmata sp. SH-PL17
  source 1..1077: mol_type = other DNA
atgggtgaccctacctttatgaacaatgtaccagaccctctgctgtcgggcaaagatttgccgacgttcaagtttgagctggaaaagagcaagggcaaagtcattggggggagttcgggaaaagaagcaaccgttgtccagttacctatctccaaaggcattgctggtgtgagcatggtacttgaaccgggtgcgatgcgcgaattgcactggcatgccacagcagcagagtgggggttcgtattatggggccacgtccgtacgacggtgatcgatccacaaggtctggccgaaaccaacgactttggaccgggcgacgtgtggtattttcctcgcggtcatgggcacatgctggaatgcctgggcgataaaccggcgcatttcattctgatcttcgataacggctacttctcagagtttggcaccttctctattactgactggatcggtcacacaccgaaagcgcttctcgccaagaactttgagctgcccgaaagcgcttttgatgggtttcccaaaaaagaggtctattttgcacgtggcgcggttccaccagccacccctgcagcgcctttacagggactgaagctgccaccactcacgcataaatacgaactcctcgaacaagaacctcataaagtttttaaaggtggtcgtgaatggcgcgtggatagcactcgttttcccatttccaagactgtaaccggcgttgttcttgatttggaacccggcgcgttacgcgagcttcactggcatcctaatgctgacgagtggcaatatgtgatcgatggcaacattagtgtgacgatgttcggttctcatggccgtgtacgcaccgaacagatggagaagggtgatgtcgggtatattccacaggggtatggccacagcatcgaaaatgttggagatcgtccttgtcgcgtcttgattggctttaacacaggtaactaccaagcgatcgacttatcacagtggattgcaggtaatcccgcggatgttcttgccacgaacttctccaaacccaccagcctctttgaaaagttcccaaaacaggacgtgtttattgctcctggcaag

SEQ ID NO: 1224 - protein, 359 aa, synthetic construct
  REGION 1..359: note = Variant of oxalate decarboxylase from Gemmata sp. SH-PL17
MGDPTFMNNVPDPLLSGKDLPTFKFELEKSKGKVIGGSSGKEATVVQLPISKGIAGVSMVLEPGAMRELHWHATAAEWGFVLWGHVRTTVIDPQGLAETNDFGPGDVWYFPRGHGHMLECLGDKPAHFILIFDNGYFSEFGTFSITDWIGHTPKALLAKNFELPESAFDGFPKKEVYFARGAVPPATPAAPLQGLKLPPLTHKYELLEQEPHKVFKGGREWRVDSTRFPISKTVTGVVLDLEPGALRELHWHPNADEWQYVIDGNISVTMFGSHGRVRTEQMEKGDVGYIPQGYGHSIENVGDRPCRVLIGFNTGNYQAIDLSQWIAGNPADVLATNFSKPTSLFEKFPKQDVFIAPGK

SEQ ID NO: 1225 - DNA, 1077 bp, synthetic construct
  misc_feature 1..1077: note = Variant of oxalate decarboxylase from Gemmata sp. SH-PL17
  source 1..1077: mol_type = other DNA
atgggtgaccctacctttatgaacaatgtaccagaccctctgctgtcgggcaaagatttgccgacgttcaagtttgagctggaaaagagcaagggcaaagtcattgggtttagttcgggaaaagaagcaaccgttgtccagttacctatctccaaaggcattgctggtgtgagcatggtacttgaaccgggtgcgatgcgcgaattgcactggcatgccacagcagcagagtgggggttcgtattatggggccacgtccgtacgacggtgatcgatccacaaggtctggccgaaaccaacgactttggaccgggcgacgtgtggtattttcctcgcggtcatgggcacatgctggaatgcctgggcgataaaccggcgcatttcattctgatcttcgataacggctacttctcagagtttggcaccttctctattactgactggatcggtcacacaccgaaagcgcttctcgccaagaactttaagctgcccgaaagcgcttttgatgggtttcccaaaaaagaggtctattttgcacgtggcgcggttccaccagccacccctgcagcgcctttacagggactgaagctgccaccactcacgcataaatacgaactcctcgaacaagaacctcataaagtttttaaaggtggtcgtgaatggcgcgtggatagcactcgttttcccatttccaagactgtaaccggcgttgttcttgatttggaacccggcgcgttacgcgagcttcactggcatcctaatgctgacgagtggcaatatgtgatcgatggcaacattagtgtgacgatgttcggttctcatggccgtgtacgcaccgaacagatggagaagggtgatgtcgggtatattccacaggggtatggccacagcatcgaaaatgttggagatcgtccttgtcgcgtcttgattggctttaacacaggtaactaccaagcgatcgacttatcacagtggattgcaggtaatcccgcggatgttcttgccacgaacttctccaaacccaccagcctctttgaaaagttcccaaaacaggacgtgtttattgctcctggcaag

SEQ ID NO: 1226 - protein, 359 aa, synthetic construct
  REGION 1..359: note = Variant of oxalate decarboxylase from Gemmata sp. SH-PL17
MGDPTFMNNVPDPLLSGKDLPTFKFELEKSKGKVIGFSSGKEATVVQLPISKGIAGVSMVLEPGAMRELHWHATAAEWGFVLWGHVRTTVIDPQGLAETNDFGPGDVWYFPRGHGHMLECLGDKPAHFILIFDNGYFSEFGTFSITDWIGHTPKALLAKNFKLPESAFDGFPKKEVYFARGAVPPATPAAPLQGLKLPPLTHKYELLEQEPHKVFKGGREWRVDSTRFPISKTVTGVVLDLEPGALRELHWHPNADEWQYVIDGNISVTMFGSHGRVRTEQMEKGDVGYIPQGYGHSIENVGDRPCRVLIGFNTGNYQAIDLSQWIAGNPADVLATNFSKPTSLFEKFPKQDVFIAPGK

SEQ ID NO: 1227 - DNA, 1077 bp, synthetic construct
  misc_feature 1..1077: note = Variant of oxalate decarboxylase from Gemmata sp. SH-PL17
  source 1..1077: mol_type = other DNA
atgggtgaccctacctttatgaacaatgtaccagaccctctgctgtcgggcaaagatttgccgacgttcaagtttgagctggaaaagagcaagggcaaagtcattgggcagagttcgggaaaagaagcaaccgttgtccagttacctatctccaaaggcattgctggtgtgagcatggtacttgaaccgggtgcgatgcgcgaattgcactggcatgccacagcagcagagtgggggttcgtattatggggccacgtccgtacgacggtgatcgatccacaaggtctggccgaaaccaacgactttggaccgggcgacgtgtggtattttcctcgcggtcatgggcacatgctggaatgcctgggcgataaaccggcgcatttcattctgatcttcgataacggctacttctcagagtttggcaccttctctattactgactggatcggtcacacaccgaaagcgcttctcgccaagaactttaagctgcccgaaagcgcttttgatgggtttcccaaaaaagaggtctattttgcacgtggcgcggttccaccagccacccctgcagcgcctttacagggactgaagctgccaccactcacgcataaatacgaactcctcgaacaagaacctcataaagtttttaaaggtggtcgtgaatggcgcgtggatagcactcgttttcccatttccaagactgtaaccggcgttgttcttgatttggaacccggcgcgttacgcgagcttcactggcatcctaatgctgacgagtggcaatatgtgatcgatggcaacattagtgtgacgatgttcggttctcatggccgtgtacgcaccgaacagatggagaagggtgatgtcgggtatattccacaggggtatggccacagcatcgaaaatgttggagatcgtccttgtcgcgtcttgattggctttaacacaggtaactaccaagcgatcgacttatcacagtggattgcaggtaatcccgcggatgttcttgccacgaacttctccaaacccaccagcctctttgaaaagttcccaaaacaggacgtgtttattgctcctggcaag

SEQ ID NO: 1228 - protein, 359 aa, synthetic construct
  REGION 1..359: note = Variant of oxalate decarboxylase from Gemmata sp. SH-PL17
MGDPTFMNNVPDPLLSGKDLPTFKFELEKSKGKVIGQSSGKEATVVQLPISKGIAGVSMVLEPGAMRELHWHATAAEWGFVLWGHVRTTVIDPQGLAETNDFGPGDVWYFPRGHGHMLECLGDKPAHFILIFDNGYFSEFGTFSITDWIGHTPKALLAKNFKLPESAFDGFPKKEVYFARGAVPPATPAAPLQGLKLPPLTHKYELLEQEPHKVFKGGREWRVDSTRFPISKTVTGVVLDLEPGALRELHWHPNADEWQYVIDGNISVTMFGSHGRVRTEQMEKGDVGYIPQGYGHSIENVGDRPCRVLIGFNTGNYQAIDLSQWIAGNPADVLATNFSKPTSLFEKFPKQDVFIAPGK

SEQ ID NO: 1229 - DNA, 1077 bp, synthetic construct
  misc_feature 1..1077: note = Variant of oxalate decarboxylase from Gemmata sp. SH-PL17
  source 1..1077: mol_type = other DNA
atgggtgaccctacctttatgaacaatgtaccagaccctctgctgtcgggcaaagatttgccgacgttcaagtttgagctggaaaagagcacgggcaaagtcattggggggagttcgggaaaagaagcaaccgttgtccagttacctatctccaaaggcattgctggtgtgagcatggtacttgaaccgggtgcgatgcgcgaattgcactggcatgccacagcagcagagtgggggttcgtattatggggccacgtccgtacgacggtgatcgatccacaaggtctggccgaaaccaacgactttggaccgggcgacgtgtggtattttcctcgcggtcatgggcacatgctggaatgcctgggcgataaaccggcgcatttcattctgatcttcgataacggctacttctcagagtttggcaccttctctattactgactggatcggtcacacaccgaaagcgcttctcgccaagaactttaagctgcccgaaagcgcttttgatgggtttcccaaaaaagaggtctattttgcacgtggcgcggttccaccagccacccctgcagcgcctttacagggactgaagctgccaccactcacgcataaatacgaactcctcgaacaagaacctcataaagtttttaaaggtggtcgtgaatggcgcgtggatagcactcgttttcccatttccaagactgtaaccggcgttgttcttgatttggaacccggcgcgttacgcgagcttcactggcatcctaatgctgacgagtggcaatatgtgatcgatggcaacattagtgtgacgatgttcggttctcatggccgtgtacgcaccgaacagatggagaagggtgatgtcgggtatattccacaggggtatggccacagcatcgaaaatgttggagatcgtccttgtcgcgtcttgattggctttaacacaggtaactaccaagcgatcgacttatcacagtggattgcaggtaatcccgcggatgttcttgccacgaacttctccaaacccaccagcctctttgaaaagttcccaaaacaggacgtgtttattgctcctggcaag

SEQ ID NO: 1230 - protein, 359 aa, synthetic construct
  REGION 1..359: note = Variant of oxalate decarboxylase from Gemmata sp. SH-PL17
MGDPTFMNNVPDPLLSGKDLPTFKFELEKSTGKVIGGSSGKEATVVQLPISKGIAGVSMVLEPGAMRELHWHATAAEWGFVLWGHVRTTVIDPQGLAETNDFGPGDVWYFPRGHGHMLECLGDKPAHFILIFDNGYFSEFGTFSITDWIGHTPKALLAKNFKLPESAFDGFPKKEVYFARGAVPPATPAAPLQGLKLPPLTHKYELLEQEPHKVFKGGREWRVDSTRFPISKTVTGVVLDLEPGALRELHWHPNADEWQYVIDGNISVTMFGSHGRVRTEQMEKGDVGYIPQGYGHSIENVGDRPCRVLIGFNTGNYQAIDLSQWIAGNPADVLATNFSKPTSLFEKFPKQDVFIAPGK

SEQ ID NO: 1231 - DNA, 1077 bp, synthetic construct
  misc_feature 1..1077: note = Variant of oxalate decarboxylase from Gemmata sp. SH-PL17
  source 1..1077: mol_type = other DNA
atgggtgaccctacctttatgaacaatgtaccagaccctctgctgtcgggcaaagatttgccgacgttcaagtttgagctggaaaagagcaagggcaaagtcattggggggagttcgggaaaagaagcaaccgttgtccagttacctatctccaaaggcattgctggtgtgagcatggtacttgaaccgggtgcgatgcgcgaattgcactggcatgccacagcagcagagtgggggttcgtattatggggccacgtccgtacgacggtgatcgatccacaaggtctggccgaaaccaacgactttggaccgggcgacgtgtggtattttcctcgcggtcatgggcacatgctggaatgcctgggcgataaaccggcgcatttcattctgatcttcgataacggctacttctcagagtttggcaccttctctattactgactggatcggtcacacaccgaaagcgcttctcgccaagaactttaagctgcccgaaagcgcttttgatgggtttcccaaagcggaggtctattttgcacgtggcgcggttccaccagccacccctgcagcgcctttacagggactgaagctgccaccactcacgcataaatacgaactcctcgaacaagaacctcataaagtttttaaaggtggtcgtgaatggcgcgtggatagcactcgttttcccatttccaagactgtaaccggcgttgttcttgatttggaacccggcgcgttacgcgagcttcactggcatcctaatgctgacgagtggcaatatgtgatcgatggcaacattagtgtgacgatgttcggttctcatggccgtgtacgcaccgaacagatggagaagggtgatgtcgggtatattccacaggggtatggccacagcatcgaaaatgttggagatcgtccttgtcgcgtcttgattggctttaacacaggtaactaccaagcgatcgacttatcacagtggattgcaggtaatcccgcggatgttcttgccacgaacttctccaaacccaccagcctctttgaaaagttcccaaaacaggacgtgtttattgctcctggcaag

SEQ ID NO: 1232 - protein, 359 aa, synthetic construct
  REGION 1..359: note = Variant of oxalate decarboxylase from Gemmata sp. SH-PL17
MGDPTFMNNVPDPLLSGKDLPTFKFELEKSKGKVIGGSSGKEATVVQLPISKGIAGVSMVLEPGAMRELHWHATAAEWGFVLWGHVRTTVIDPQGLAETNDFGPGDVWYFPRGHGHMLECLGDKPAHFILIFDNGYFSEFGTFSITDWIGHTPKALLAKNFKLPESAFDGFPKAEVYFARGAVPPATPAAPLQGLKLPPLTHKYELLEQEPHKVFKGGREWRVDSTRFPISKTVTGVVLDLEPGALRELHWHPNADEWQYVIDGNISVTMFGSHGRVRTEQMEKGDVGYIPQGYGHSIENVGDRPCRVLIGFNTGNYQAIDLSQWIAGNPADVLATNFSKPTSLFEKFPKQDVFIAPGK

SEQ ID NO: 1233 - DNA, 1077 bp, synthetic construct
  misc_feature 1..1077: note = Variant of oxalate decarboxylase from Gemmata sp. SH-PL17
  source 1..1077: mol_type = other DNA
atgggtgaccctacctttatgaacaatgtaccagaccctctgctgtcgggcaaagatttgccgacgttcaagtttgagctggaaaagagcaagggcaaagtcattggggggagttcgggaaaagaagcaaccgttgtccagttacctatctccaaaggcattgctggtgtgagcatggtacttgaaccgggtgcgatgcgcgaattgcactggcatgccacagcagcagagtgggggttcgtattatttggccacgtccgtacgacggtgatcgatccacaaggtctggccgaaaccaacgactttggaccgggcgacgtgtggtattttcctcgcggtcatgggcacatgctggaatgcctgggcgataaaccggcgcatttcattctgatcttcgataacggctacttctcagagtttggcaccttctctattactgactggatcggtcacacaccgaaagcgcttctcgccaagaactttaagctgcccgaaagcgcttttgatgggtttcccaaaaaagaggtctattttgcacgtggcgcggttccaccagccacccctgcagcgcctttacagggactgaagctgccaccactcacgcataaatacgaactcctcgaacaagaacctcataaagtttttaaaggtggtcgtgaatggcgcgtggatagcactcgttttcccatttccaagactgtaaccggcgttgttcttgatttggaacccggcgcgttacgcgagcttcactggcatcctaatgctgacgagtggcaatatgtgatcgatggcaacattagtgtgacgatgttcggttctcatggccgtgtacgcaccgaacagatggagaagggtgatgtcgggtatattccacaggggtatggccacagcatcgaaaatgttggagatcgtccttgtcgcgtcttgattggctttaacacaggtaactaccaagcgatcgacttatcacagtggattgcaggtaatcccgcggatgttcttgccacgaacttctccaaacccaccagcctctttgaaaagttcccaaaacaggacgtgtttattgctcctggcaag

SEQ ID NO: 1234 - protein, 359 aa, synthetic construct
  REGION 1..359: note = Variant of oxalate decarboxylase from Gemmata sp. SH-PL17
MGDPTFMNNVPDPLLSGKDLPTFKFELEKSKGKVIGGSSGKEATVVQLPISKGIAGVSMVLEPGAMRELHWHATAAEWGFVLFGHVRTTVIDPQGLAETNDFGPGDVWYFPRGHGHMLECLGDKPAHFILIFDNGYFSEFGTFSITDWIGHTPKALLAKNFKLPESAFDGFPKKEVYFARGAVPPATPAAPLQGLKLPPLTHKYELLEQEPHKVFKGGREWRVDSTRFPISKTVTGVVLDLEPGALRELHWHPNADEWQYVIDGNISVTMFGSHGRVRTEQMEKGDVGYIPQGYGHSIENVGDRPCRVLIGFNTGNYQAIDLSQWIAGNPADVLATNFSKPTSLFEKFPKQDVFIAPGK

SEQ ID NO: 1235 - DNA, 1077 bp, synthetic construct
  misc_feature 1..1077: note = Variant of oxalate decarboxylase from Gemmata sp. SH-PL17
  source 1..1077: mol_type = other DNA
atgggtgaccctacctttatgaacaatgtaccagaccctctgctgtcgggcaaagatttgccgacgttcaagtttgagctggaaaagagcaagggcaaagtcattggggggagttcgggaaaagaagcaaccgttgtccagttacctatctccaaaggcattgctggtgtgagcatgactcttgaaccgggtgcgatgcgcgaattgcactggcatgccacagcagcagagtgggggttcgtattatggggccacgtccgtacgacggtgatcgatccacaaggtctggccgaaaccaacgactttggaccgggcgacgtgtggtattttcctcgcggtcatgggcacatgctggaatgcctgggcgataaaccggcgcatttcattctgatcttcgataacggctacttctcagagtttggcaccttctctattactgactggatcggtcacacaccgaaagcgcttctcgccaagaactttaagctgcccgaaagcgcttttgatgggtttcccaaaaaagaggtctattttgcacgtggcgcggttccaccagccacccctgcagcgcctttacagggactgaagctgccaccactcacgcataaatacgaactcctcgaacaagaacctcataaagtttttaaaggtggtcgtgaatggcgcgtggatagcactcgttttcccatttccaagactgtaaccggcgttgttcttgatttggaacccggcgcgttacgcgagcttcactggcatcctaatgctgacgagtggcaatatgtgatcgatggcaacattagtgtgacgatgttcggttctcatggccgtgtacgcaccgaacagatggagaagggtgatgtcgggtatattccacaggggtatggccacagcatcgaaaatgttggagatcgtccttgtcgcgtcttgattggctttaacacaggtaactaccaagcgatcgacttatcacagtggattgcaggtaatcccgcggatgttcttgccacgaacttctccaaacccaccagcctctttgaaaagttcccaaaacaggacgtgtttattgctcctggcaag

SEQ ID NO: 1236 - protein, 359 aa, synthetic construct
  REGION 1..359: note = Variant of oxalate decarboxylase from Gemmata sp. SH-PL17
MGDPTFMNNVPDPLLSGKDLPTFKFELEKSKGKVIGGSSGKEATVVQLPISKGIAGVSMTLEPGAMRELHWHATAAEWGFVLWGHVRTTVIDPQGLAETNDFGPGDVWYFPRGHGHMLECLGDKPAHFILIFDNGYFSEFGTFSITDWIGHTPKALLAKNFKLPESAFDGFPKKEVYFARGAVPPATPAAPLQGLKLPPLTHKYELLEQEPHKVFKGGREWRVDSTRFPISKTVTGVVLDLEPGALRELHWHPNADEWQYVIDGNISVTMFGSHGRVRTEQMEKGDVGYIPQGYGHSIENVGDRPCRVLIGFNTGNYQAIDLSQWIAGNPADVLATNFSKPTSLFEKFPKQDVFIAPGK

SEQ ID NO: 1237 - DNA, 1077 bp, synthetic construct
  misc_feature 1..1077: note = Variant of oxalate decarboxylase from Gemmata sp. SH-PL17
  source 1..1077: mol_type = other DNA
atgggtgaccctacctttatgaacaatgtaccagaccctctgctgtcgggcaaagatttgccgacgttcaagtttgagctggaaaagagcaagggcaaagtcattggggggagttcgggaaaagaagcaaccgttgtccagttacctatctccaaaggcattgctggtgtgagcatggtacttgaaccgggtgcgatgcgcgaattgcactggcatgccacagcagcagagtgggggttcgtattatggggccacgtccgtacgacggtgatcgatccacaaggtagtgccgaaaccaacgactttggaccgggcgacgtgtggtattttcctcgcggtcatgggcacatgctggaatgcctgggcgataaaccggcgcatttcattctgatcttcgataacggctacttctcagagtttggcaccttctctattactgactggatcggtcacacaccgaaagcgcttctcgccaagaactttaagctgcccgaaagcgcttttgatgggtttcccaaaaaagaggtctattttgcacgtggcgcggttccaccagccacccctgcagcgcctttacagggactgaagctgccaccactcacgcataaatacgaactcctcgaacaagaacctcataaagtttttaaaggtggtcgtgaatggcgcgtggatagcactcgttttcccatttccaagactgtaaccggcgttgttcttgatttggaacccggcgcgttacgcgagcttcactggcatcctaatgctgacgagtggcaatatgtgatcgatggcaacattagtgtgacgatgttcggttctcatggccgtgtacgcaccgaacagatggagaagggtgatgtcgggtatattccacaggggtatggccacagcatcgaaaatgttggagatcgtccttgtcgcgtcttgattggctttaacacaggtaactaccaagcgatcgacttatcacagtggattgcaggtaatcccgcggatgttcttgccacgaacttctccaaacccaccagcctctttgaaaagttcccaaaacaggacgtgtttattgctcctggcaag

SEQ ID NO: 1238 - protein, 359 aa, synthetic construct
  REGION 1..359: note = Variant of oxalate decarboxylase from Gemmata sp. SH-PL17
MGDPTFMNNVPDPLLSGKDLPTFKFELEKSKGKVIGGSSGKEATVVQLPISKGIAGVSMVLEPGAMRELHWHATAAEWGFVLWGHVRTTVIDPQGSAETNDFGPGDVWYFPRGHGHMLECLGDKPAHFILIFDNGYFSEFGTFSITDWIGHTPKALLAKNFKLPESAFDGFPKKEVYFARGAVPPATPAAPLQGLKLPPLTHKYELLEQEPHKVFKGGREWRVDSTRFPISKTVTGVVLDLEPGALRELHWHPNADEWQYVIDGNISVTMFGSHGRVRTEQMEKGDVGYIPQGYGHSIENVGDRPCRVLIGFNTGNYQAIDLSQWIAGNPADVLATNFSKPTSLFEKFPKQDVFIAPGK

SEQ ID NO: 1239 - DNA, 1077 bp, synthetic construct
  misc_feature 1..1077: note = Variant of oxalate decarboxylase from Gemmata sp. SH-PL17
  source 1..1077: mol_type = other DNA
atgggtgaccctacctttatgaacaatgtaccagaccctctgctgtcgggcaaagatttgccgacgttcaagtttgagctggaaaagagcaagggcaaagtcattggggggagttcgggaaaagaagcaaccgttgtccagttacctatctccaaaggcattgctggtgtgagcatggtacttgaaccgggtgcgatgcgcgaattgcactggcatgccacagcagcagagtgggggttcgtattagtgggccacgtccgtacgacggtgatcgatccacaaggtctggccgaaaccaacgactttggaccgggcgacgtgtggtattttcctcgcggtcatgggcacatgctggaatgcctgggcgataaaccggcgcatttcattctgatcttcgataacggctacttctcagagtttggcaccttctctattactgactggatcggtcacacaccgaaagcgcttctcgccaagaactttaagctgcccgaaagcgcttttgatgggtttcccaaaaaagaggtctattttgcacgtggcgcggttccaccagccacccctgcagcgcctttacagggactgaagctgccaccactcacgcataaatacgaactcctcgaacaagaacctcataaagtttttaaaggtggtcgtgaatggcgcgtggatagcactcgttttcccatttccaagactgtaaccggcgttgttcttgatttggaacccggcgcgttacgcgagcttcactggcatcctaatgctgacgagtggcaatatgtgatcgatggcaacattagtgtgacgatgttcggttctcatggccgtgtacgcaccgaacagatggagaagggtgatgtcgggtatattccacaggggtatggccacagcatcgaaaatgttggagatcgtccttgtcgcgtcttgattggctttaacacaggtaactaccaagcgatcgacttatcacagtggattgcaggtaatcccgcggatgttcttgccacgaacttctccaaacccaccagcctctttgaaaagttcccaaaacaggacgtgtttattgctcctggcaag

SEQ ID NO: 1240 - protein, 359 aa, synthetic construct
  REGION 1..359: note = Variant of oxalate decarboxylase from Gemmata sp. SH-PL17
MGDPTFMNNVPDPLLSGKDLPTFKFELEKSKGKVIGGSSGKEATVVQLPISKGIAGVSMVLEPGAMRELHWHATAAEWGFVLVGHVRTTVIDPQGLAETNDFGPGDVWYFPRGHGHMLECLGDKPAHFILIFDNGYFSEFGTFSITDWIGHTPKALLAKNFKLPESAFDGFPKKEVYFARGAVPPATPAAPLQGLKLPPLTHKYELLEQEPHKVFKGGREWRVDSTRFPISKTVTGVVLDLEPGALRELHWHPNADEWQYVIDGNISVTMFGSHGRVRTEQMEKGDVGYIPQGYGHSIENVGDRPCRVLIGFNTGNYQAIDLSQWIAGNPADVLATNFSKPTSLFEKFPKQDVFIAPGK

SEQ ID NO: 1241 - DNA, 1077 bp, synthetic construct
  misc_feature 1..1077: note = Variant of oxalate decarboxylase from Gemmata sp. SH-PL17
  source 1..1077: mol_type = other DNA
atgggtgaccctacctttatgaacaatgtaccagaccctctgctgtcgggcaaagatttgccgacgttcaagtttgagctggaaaagagcaagggcaaagtcattggggggagttcgggaaaagaagcaaccgttgtccagttacctatctccaaaggcattgctggtgtgagcatggtacttgaaccgggtgcgatgcgcgaattgcactggcatgccacagcagcagagtgggggttcgtattatggggccacgtccgtacgacggtgatcgatccacaaggtctggccgaaaccaacgactttggaccgggcgacgtgtggtattttcctcgcggtcatgggcacatgctggaatgcctgggcgataaaccggcgcatttcattctgatcttcgataacggctacttctcagagtttggcaccttctctattactgactggatcggtcacacaccgaaagcgcttctcgccaagaactttaagctgcccgaaagcgcttttgatgggtttcccaaaaaagaggtctattttgcacgtggcgcggttccaccagccacccctgcagcgcctttacagggactgaagctgccaccactcacgcataaatacgaactcctcgaacaaattcctcataaagtttttaaaggtggtcgtgaatggcgcgtggatagcactcgttttcccatttccaagactgtaaccggcgttgttcttgatttggaacccggcgcgttacgcgagcttcactggcatcctaatgctgacgagtggcaatatgtgatcgatggcaacattagtgtgacgatgttcggttctcatggccgtgtacgcaccgaacagatggagaagggtgatgtcgggtatattccacaggggtatggccacagcatcgaaaatgttggagatcgtccttgtcgcgtcttgattggctttaacacaggtaactaccaagcgatcgacttatcacagtggattgcaggtaatcccgcggatgttcttgccacgaacttctccaaacccaccagcctctttgaaaagttcccaaaacaggacgtgtttattgctcctggcaag

SEQ ID NO: 1242 - protein, 359 aa, synthetic construct
  REGION 1..359: note = Variant of oxalate decarboxylase from Gemmata sp. SH-PL17
MGDPTFMNNVPDPLLSGKDLPTFKFELEKSKGKVIGGSSGKEATVVQLPISKGIAGVSMVLEPGAMRELHWHATAAEWGFVLWGHVRTTVIDPQGLAETNDFGPGDVWYFPRGHGHMLECLGDKPAHFILIFDNGYFSEFGTFSITDWIGHTPKALLAKNFKLPESAFDGFPKKEVYFARGAVPPATPAAPLQGLKLPPLTHKYELLEQIPHKVFKGGREWRVDSTRFPISKTVTGVVLDLEPGALRELHWHPNADEWQYVIDGNISVTMFGSHGRVRTEQMEKGDVGYIPQGYGHSIENVGDRPCRVLIGFNTGNYQAIDLSQWIAGNPADVLATNFSKPTSLFEKFPKQDVFIAPGK

SEQ ID NO: 1243 - DNA, 1077 bp, synthetic construct
  misc_feature 1..1077: note = Variant of oxalate decarboxylase from Gemmata sp. SH-PL17
  source 1..1077: mol_type = other DNA
atgggtgaccctacctttatgaacaatgtaccagaccctctgctggatggcaaagatttgccgacgttcaagtttgagctggaaaagagcaagggcaaagtcattggggggagttcgggaaaagaagcaaccgttgtccagttacctatctccaaaggcattgctggtgtgagcatggtacttgaaccgggtgcgatgcgcgaattgcactggcatgccacagcagcagagtgggggttcgtattatggggccacgtccgtacgacggtgatcgatccacaaggtctggccgaaaccaacgactttggaccgggcgacgtgtggtattttcctcgcggtcatgggcacatgctggaatgcctgggcgataaaccggcgcatttcattctgatcttcgataacggctacttctcagagtttggcaccttctctattactgactggatcggtcacacaccgaaagcgcttctcgccaagaactttaagctgcccgaaagcgcttttgatgggtttcccaaaaaagaggtctattttgcacgtggcgcggttccaccagccacccctgcagcgcctttacagggactgaagctgccaccactcacgcataaatacgaactcctcgaacaagaacctcataaagtttttaaaggtggtcgtgaatggcgcgtggatagcactcgttttcccatttccaagactgtaaccggcgttgttcttgatttggaacccggcgcgttacgcgagcttcactggcatcctaatgctgacgagtggcaatatgtgatcgatggcaacattagtgtgacgatgttcggttctcatggccgtgtacgcaccgaacagatggagaagggtgatgtcgggtatattccacaggggtatggccacagcatcgaaaatgttggagatcgtccttgtcgcgtcttgattggctttaacacaggtaactaccaagcgatcgacttatcacagtggattgcaggtaatcccgcggatgttcttgccacgaacttctccaaacccaccagcctctttgaaaagttcccaaaacaggacgtgtttattgctcctggcaag

SEQ ID NO: 1244 - protein, 359 aa, synthetic construct
  REGION 1..359: note = Variant of oxalate decarboxylase from Gemmata sp. SH-PL17
MGDPTFMNNVPDPLLDGKDLPTFKFELEKSKGKVIGGSSGKEATVVQLPISKGIAGVSMVLEPGAMRELHWHATAAEWGFVLWGHVRTTVIDPQGLAETNDFGPGDVWYFPRGHGHMLECLGDKPAHFILIFDNGYFSEFGTFSITDWIGHTPKALLAKNFKLPESAFDGFPKKEVYFARGAVPPATPAAPLQGLKLPPLTHKYELLEQEPHKVFKGGREWRVDSTRFPISKTVTGVVLDLEPGALRELHWHPNADEWQYVIDGNISVTMFGSHGRVRTEQMEKGDVGYIPQGYGHSIENVGDRPCRVLIGFNTGNYQAIDLSQWIAGNPADVLATNFSKPTSLFEKFPKQDVFIAPGK

SEQ ID NO: 1245 - DNA, 1077 bp, synthetic construct
  misc_feature 1..1077: note = Variant of oxalate decarboxylase from Gemmata sp. SH-PL17
  source 1..1077: mol_type = other DNA
atgggtgaccctacctttatgaacaatgtaccagaccctctgctgtcgggcaaagatttgccgacgttcaagtttgagctggaaaagagcaagggcaaagtcattgggtgtagttcgggaaaagaagcaaccgttgtccagttacctatctccaaaggcattgctggtgtgagcatggtacttgaaccgggtgcgatgcgcgaattgcactggcatgccacagcagcagagtgggggttcgtattatggggccacgtccgtacgacggtgatcgatccacaaggtctggccgaaaccaacgactttggaccgggcgacgtgtggtattttcctcgcggtcatgggcacatgctggaatgcctgggcgataaaccggcgcatttcattctgatcttcgataacggctacttctcagagtttggcaccttctctattactgactggatcggtcacacaccgaaagcgcttctcgccaagaactttaagctgcccgaaagcgcttttgatgggtttcccaaaaaagaggtctattttgcacgtggcgcggttccaccagccacccctgcagcgcctttacagggactgaagctgccaccactcacgcataaatacgaactcctcgaacaagaacctcataaagtttttaaaggtggtcgtgaatggcgcgtggatagcactcgttttcccatttccaagactgtaaccggcgttgttcttgatttggaacccggcgcgttacgcgagcttcactggcatcctaatgctgacgagtggcaatatgtgatcgatggcaacattagtgtgacgatgttcggttctcatggccgtgtacgcaccgaacagatggagaagggtgatgtcgggtatattccacaggggtatggccacagcatcgaaaatgttggagatcgtccttgtcgcgtcttgattggctttaacacaggtaactaccaagcgatcgacttatcacagtggattgcaggtaatcccgcggatgttcttgccacgaacttctccaaacccaccagcctctttgaaaagttcccaaaacaggacgtgtttattgctcctggcaag

SEQ ID NO: 1246 - protein, 359 aa, synthetic construct
  REGION 1..359: note = Variant of oxalate decarboxylase from Gemmata sp. SH-PL17
MGDPTFMNNVPDPLLSGKDLPTFKFELEKSKGKVIGCSSGKEATVVQLPISKGIAGVSMVLEPGAMRELHWHATAAEWGFVLWGHVRTTVIDPQGLAETNDFGPGDVWYFPRGHGHMLECLGDKPAHFILIFDNGYFSEFGTFSITDWIGHTPKALLAKNFKLPESAFDGFPKKEVYFARGAVPPATPAAPLQGLKLPPLTHKYELLEQEPHKVFKGGREWRVDSTRFPISKTVTGVVLDLEPGALRELHWHPNADEWQYVIDGNISVTMFGSHGRVRTEQMEKGDVGYIPQGYGHSIENVGDRPCRVLIGFNTGNYQAIDLSQWIAGNPADVLATNFSKPTSLFEKFPKQDVFIAPGK

SEQ ID NO: 1247 - DNA, 1077 bp, synthetic construct
  misc_feature 1..1077: note = Variant of oxalate decarboxylase from Gemmata sp. SH-PL17
  source 1..1077: mol_type = other DNA
atgggtgaccctacctttatgaacaatgtaccagaccctctgctgtcgggcaaagatttgccgacgttcaagtttgagctggaaaagagcaagggcaaagtcattggggggagttcgggaaaagaagcaaccgttgtccagttacctatctccaaaggcattgctggtgtgagcatggtacttgaaccgggtgcgatgcgcgaattgcactggcatgccacagcagcagagtgggggttcgtattagggggccacgtccgtacgacggtgatcgatccacaaggtctggccgaaaccaacgactttggaccgggcgacgtgtggtattttcctcgcggtcatgggcacatgctggaatgcctgggcgataaaccggcgcatttcattctgatcttcgataacggctacttctcagagtttggcaccttctctattactgactggatcggtcacacaccgaaagcgcttctcgccaagaactttaagctgcccgaaagcgcttttgatgggtttcccaaaaaagaggtctattttgcacgtggcgcggttccaccagccacccctgcagcgcctttacagggactgaagctgccaccactcacgcataaatacgaactcctcgaacaagaacctcataaagtttttaaaggtggtcgtgaatggcgcgtggatagcactcgttttcccatttccaagactgtaaccggcgttgttcttgatttggaacccggcgcgttacgcgagcttcactggcatcctaatgctgacgagtggcaatatgtgatcgatggcaacattagtgtgacgatgttcggttctcatggccgtgtacgcaccgaacagatggagaagggtgatgtcgggtatattccacaggggtatggccacagcatcgaaaatgttggagatcgtccttgtcgcgtcttgattggctttaacacaggtaactaccaagcgatcgacttatcacagtggattgcaggtaatcccgcggatgttcttgccacgaacttctccaaacccaccagcctctttgaaaagttcccaaaacaggacgtgtttattgctcctggcaag

SEQ ID NO: 1248 - protein, 359 aa, synthetic construct
  REGION 1..359: note = Variant of oxalate decarboxylase from Gemmata sp. SH-PL17
MGDPTFMNNVPDPLLSGKDLPTFKFELEKSKGKVIGGSSGKEATVVQLPISKGIAGVSMVLEPGAMRELHWHATAAEWGFVLGGHVRTTVIDPQGLAETNDFGPGDVWYFPRGHGHMLECLGDKPAHFILIFDNGYFSEFGTFSITDWIGHTPKALLAKNFKLPESAFDGFPKKEVYFARGAVPPATPAAPLQGLKLPPLTHKYELLEQEPHKVFKGGREWRVDSTRFPISKTVTGVVLDLEPGALRELHWHPNADEWQYVIDGNISVTMFGSHGRVRTEQMEKGDVGYIPQGYGHSIENVGDRPCRVLIGFNTGNYQAIDLSQWIAGNPADVLATNFSKPTSLFEKFPKQDVFIAPGK

SEQ ID NO: 1249 - DNA, 1077 bp, synthetic construct
  misc_feature 1..1077: note = Variant of oxalate decarboxylase from Gemmata sp. SH-PL17
  source 1..1077: mol_type = other DNA
atgggtgaccctacctttatgaacaatgtaccagacaatctgctgtcgggcaaagatttgccgacgttcaagtttgagctggaaaagagcaagggcaaagtcattggggggagttcgggaaaagaagcaaccgttgtccagttacctatctccaaaggcattgctggtgtgagcatggtacttgaaccgggtgcgatgcgcgaattgcactggcatgccacagcagcagagtgggggttcgtattatggggccacgtccgtacgacggtgatcgatccacaaggtctggccgaaaccaacgactttggaccgggcgacgtgtggtattttcctcgcggtcatgggcacatgctggaatgcctgggcgataaaccggcgcatttcattctgatcttcgataacggctacttctcagagtttggcaccttctctattactgactggatcggtcacacaccgaaagcgcttctcgccaagaactttaagctgcccgaaagcgcttttgatgggtttcccaaaaaagaggtctattttgcacgtggcgcggttccaccagccacccctgcagcgcctttacagggactgaagctgccaccactcacgcataaatacgaactcctcgaacaagaacctcataaagtttttaaaggtggtcgtgaatggcgcgtggatagcactcgttttcccatttccaagactgtaaccggcgttgttcttgatttggaacccggcgcgttacgcgagcttcactggcatcctaatgctgacgagtggcaatatgtgatcgatggcaacattagtgtgacgatgttcggttctcatggccgtgtacgcaccgaacagatggagaagggtgatgtcgggtatattccacaggggtatggccacagcatcgaaaatgttggagatcgtccttgtcgcgtcttgattggctttaacacaggtaactaccaagcgatcgacttatcacagtggattgcaggtaatcccgcggatgttcttgccacgaacttctccaaacccaccagcctctttgaaaagttcccaaaacaggacgtgtttattgctcctggcaag

SEQ ID NO: 1250 - protein, 359 aa, synthetic construct
  REGION 1..359: note = Variant of oxalate decarboxylase from Gemmata sp. SH-PL17
MGDPTFMNNVPDNLLSGKDLPTFKFELEKSKGKVIGGSSGKEATVVQLPISKGIAGVSMVLEPGAMRELHWHATAAEWGFVLWGHVRTTVIDPQGLAETNDFGPGDVWYFPRGHGHMLECLGDKPAHFILIFDNGYFSEFGTFSITDWIGHTPKALLAKNFKLPESAFDGFPKKEVYFARGAVPPATPAAPLQGLKLPPLTHKYELLEQEPHKVFKGGREWRVDSTRFPISKTVTGVVLDLEPGALRELHWHPNADEWQYVIDGNISVTMFGSHGRVRTEQMEKGDVGYIPQGYGHSIENVGDRPCRVLIGFNTGNYQAIDLSQWIAGNPADVLATNFSKPTSLFEKFPKQDVFIAPGK

SEQ ID NO: 1251 - DNA, 1077 bp, synthetic construct
  misc_feature 1..1077: note = Variant of oxalate decarboxylase from Gemmata sp. SH-PL17
  source 1..1077: mol_type = other DNA
atgggtgaccctacctttatgaacaatgtaccagaccctctgctgtcgggcaaagatttgccgacgttcaagtttgagctggaaaagagcgtgggcaaagtcattggggggagttcgggaaaagaagcaaccgttgtccagttacctatctccaaaggcattgctggtgtgagcatggtacttgaaccgggtgcgatgcgcgaattgcactggcatgccacagcagcagagtgggggttcgtattatggggccacgtccgtacgacggtgatcgatccacaaggtctggccgaaaccaacgactttggaccgggcgacgtgtggtattttcctcgcggtcatgggcacatgctggaatgcctgggcgataaaccggcgcatttcattctgatcttcgataacggctacttctcagagtttggcaccttctctattactgactggatcggtcacacaccgaaagcgcttctcgccaagaactttaagctgcccgaaagcgcttttgatgggtttcccaaaaaagaggtctattttgcacgtggcgcggttccaccagccacccctgcagcgcctttacagggactgaagctgccaccactcacgcataaatacgaactcctcgaacaagaacctcataaagtttttaaaggtggtcgtgaatggcgcgtggatagcactcgttttcccatttccaagactgtaaccggcgttgttcttgatttggaacccggcgcgttacgcgagcttcactggcatcctaatgctgacgagtggcaatatgtgatcgatggcaacattagtgtgacgatgttcggttctcatggccgtgtacgcaccgaacagatggagaagggtgatgtcgggtatattccacaggggtatggccacagcatcgaaaatgttggagatcgtccttgtcgcgtcttgattggctttaacacaggtaactaccaagcgatcgacttatcacagtggattgcaggtaatcccgcggatgttcttgccacgaacttctccaaacccaccagcctctttgaaaagttcccaaaacaggacgtgtttattgctcctggcaag

SEQ ID NO: 1252 - protein, 359 aa, synthetic construct
  REGION 1..359: note = Variant of oxalate decarboxylase from Gemmata sp. SH-PL17
MGDPTFMNNVPDPLLSGKDLPTFKFELEKSVGKVIGGSSGKEATVVQLPISKGIAGVSMVLEPGAMRELHWHATAAEWGFVLWGHVRTTVIDPQGLAETNDFGPGDVWYFPRGHGHMLECLGDKPAHFILIFDNGYFSEFGTFSITDWIGHTPKALLAKNFKLPESAFDGFPKKEVYFARGAVPPATPAAPLQGLKLPPLTHKYELLEQEPHKVFKGGREWRVDSTRFPISKTVTGVVLDLEPGALRELHWHPNADEWQYVIDGNISVTMFGSHGRVRTEQMEKGDVGYIPQGYGHSIENVGDRPCRVLIGFNTGNYQAIDLSQWIAGNPADVLATNFSKPTSLFEKFPKQDVFIAPGK

SEQ ID NO: 1253 - DNA, 1077 bp, synthetic construct
  misc_feature 1..1077: note = Variant of oxalate decarboxylase from Gemmata sp. SH-PL17
  source 1..1077: mol_type = other DNA
atgggtgaccctacctttatgaacaatgtaccagaccctctgctgtcgggcaaagatttgccgacgttcaagtttgagctggaaaagagcaagggcaaagtcattggggggagttcgggaaaagaagcaaccgttgtccagttacctatctccaaaggcattgctggtgtgagcatggtacttgaaccgggtgcgatgcgcgaattgcactggcatgccacagcagcagagtggtcgttcgtattatggggccacgtccgtacgacggtgatcgatccacaaggtctggccgaaaccaacgactttggaccgggcgacgtgtggtattttcctcgcggtcatgggcacatgctggaatgcctgggcgataaaccggcgcatttcattctgatcttcgataacggctacttctcagagtttggcaccttctctattactgactggatcggtcacacaccgaaagcgcttctcgccaagaactttaagctgcccgaaagcgcttttgatgggtttcccaaaaaagaggtctattttgcacgtggcgcggttccaccagccacccctgcagcgcctttacagggactgaagctgccaccactcacgcataaatacgaactcctcgaacaagaacctcataaagtttttaaaggtggtcgtgaatggcgcgtggatagcactcgttttcccatttccaagactgtaaccggcgttgttcttgatttggaacccggcgcgttacgcgagcttcactggcatcctaatgctgacgagtggcaatatgtgatcgatggcaacattagtgtgacgatgttcggttctcatggccgtgtacgcaccgaacagatggagaagggtgatgtcgggtatattccacaggggtatggccacagcatcgaaaatgttggagatcgtccttgtcgcgtcttgattggctttaacacaggtaactaccaagcgatcgacttatcacagtggattgcaggtaatcccgcggatgttcttgccacgaacttctccaaacccaccagcctctttgaaaagttcccaaaacaggacgtgtttattgctcctggcaag

SEQ ID NO: 1254 - protein, 359 aa, synthetic construct
  REGION 1..359: note = Variant of oxalate decarboxylase from Gemmata sp. SH-PL17
MGDPTFMNNVPDPLLSGKDLPTFKFELEKSKGKVIGGSSGKEATVVQLPISKGIAGVSMVLEPGAMRELHWHATAAEWSFVLWGHVRTTVIDPQGLAETNDFGPGDVWYFPRGHGHMLECLGDKPAHFILIFDNGYFSEFGTFSITDWIGHTPKALLAKNFKLPESAFDGFPKKEVYFARGAVPPATPAAPLQGLKLPPLTHKYELLEQEPHKVFKGGREWRVDSTRFPISKTVTGVVLDLEPGALRELHWHPNADEWQYVIDGNISVTMFGSHGRVRTEQMEKGDVGYIPQGYGHSIENVGDRPCRVLIGFNTGNYQAIDLSQWIAGNPADVLATNFSKPTSLFEKFPKQDVFIAPGK

SEQ ID NO: 1255 - DNA, 1077 bp, synthetic construct
  misc_feature 1..1077: note = Variant of oxalate decarboxylase from Gemmata sp. SH-PL17
  source 1..1077: mol_type = other DNA
atgggtgaccctacctttatgaacaatgtaccagaccctctgctgtcgggcaaagatttgccgacgttcaagtttgagctggaaaagagcaagggcaaagtcattggggggagttcgggaaaagaagcaaccgttgtccagttacctatctccaaaggcattgctggtgtgagcatggtacttgaaccgggtgcgatgcgcgaattgcactggcatgccacagcagcagagtgggggttcgtattatggggccacgtccgtacgacggtgatcgatccacaaggttatgccgaaaccaacgactttggaccgggcgacgtgtggtattttcctcgcggtcatgggcacatgctggaatgcctgggcgataaaccggcgcatttcattctgatcttcgataacggctacttctcagagtttggcaccttctctattactgactggatcggtcacacaccgaaagcgcttctcgccaagaactttaagctgcccgaaagcgcttttgatgggtttcccaaaaaagaggtctattttgcacgtggcgcggttccaccagccacccctgcagcgcctttacagggactgaagctgccaccactcacgcataaatacgaactcctcgaacaagaacctcataaagtttttaaaggtggtcgtgaatggcgcgtggatagcactcgttttcccatttccaagactgtaaccggcgttgttcttgatttggaacccggcgcgttacgcgagcttcactggcatcctaatgctgacgagtggcaatatgtgatcgatggcaacattagtgtgacgatgttcggttctcatggccgtgtacgcaccgaacagatggagaagggtgatgtcgggtatattccacaggggtatggccacagcatcgaaaatgttggagatcgtccttgtcgcgtcttgattggctttaacacaggtaactaccaagcgatcgacttatcacagtggattgcaggtaatcccgcggatgttcttgccacgaacttctccaaacccaccagcctctttgaaaagttcccaaaacaggacgtgtttattgctcctggcaag

SEQ ID NO: 1256 - protein, 359 aa, synthetic construct
  REGION 1..359: note = Variant of oxalate decarboxylase from Gemmata sp. SH-PL17
MGDPTFMNNVPDPLLSGKDLPTFKFELEKSKGKVIGGSSGKEATVVQLPISKGIAGVSMVLEPGAMRELHWHATAAEWGFVLWGHVRTTVIDPQGYAETNDFGPGDVWYFPRGHGHMLECLGDKPAHFILIFDNGYFSEFGTFSITDWIGHTPKALLAKNFKLPESAFDGFPKKEVYFARGAVPPATPAAPLQGLKLPPLTHKYELLEQEPHKVFKGGREWRVDSTRFPISKTVTGVVLDLEPGALRELHWHPNADEWQYVIDGNISVTMFGSHGRVRTEQMEKGDVGYIPQGYGHSIENVGDRPCRVLIGFNTGNYQAIDLSQWIAGNPADVLATNFSKPTSLFEKFPKQDVFIAPGK

SEQ ID NO: 1257 - DNA, 1077 bp, synthetic construct
  misc_feature 1..1077: note = Variant of oxalate decarboxylase from Gemmata sp. SH-PL17
  source 1..1077: mol_type = other DNA
atgggtgaccctacctttatgaacaatgtaccagaccctctgctgtcgtttaaagatttgccgacgttcaagtttgagctggaaaagagcaagggcaaagtcattggggggagttcgggaaaagaagcaaccgttgtccagttacctatctccaaaggcattgctggtgtgagcatggtacttgaaccgggtgcgatgcgcgaattgcactggcatgccacagcagcagagtgggggttcgtattatggggccacgtccgtacgacggtgatcgatccacaaggtctggccgaaaccaacgactttggaccgggcgacgtgtggtattttcctcgcggtcatgggcacatgctggaatgcctgggcgataaaccggcgcatttcattctgatcttcgataacggctacttctcagagtttggcaccttctctattactgactggatcggtcacacaccgaaagcgcttctcgccaagaactttaagctgcccgaaagcgcttttgatgggtttcccaaaaaagaggtctattttgcacgtggcgcggttccaccagccacccctgcagcgcctttacagggactgaagctgccaccactcacgcataaatacgaactcctcgaacaagaacctcataaagtttttaaaggtggtcgtgaatggcgcgtggatagcactcgttttcccatttccaagactgtaaccggcgttgttcttgatttggaacccggcgcgttacgcgagcttcactggcatcctaatgctgacgagtggcaatatgtgatcgatggcaacattagtgtgacgatgttcggttctcatggccgtgtacgcaccgaacagatggagaagggtgatgtcgggtatattccacaggggtatggccacagcatcgaaaatgttggagatcgtccttgtcgcgtcttgattggctttaacacaggtaactaccaagcgatcgacttatcacagtggattgcaggtaatcccgcggatgttcttgccacgaacttctccaaacccaccagcctctttgaaaagttcccaaaacaggacgtgtttattgctcctggcaag

SEQ ID NO: 1258 - protein, 359 aa, synthetic construct
  REGION 1..359: note = Variant of oxalate decarboxylase from Gemmata sp. SH-PL17
MGDPTFMNNVPDPLLSFKDLPTFKFELEKSKGKVIGGSSGKEATVVQLPISKGIAGVSMVLEPGAMRELHWHATAAEWGFVLWGHVRTTVIDPQGLAETNDFGPGDVWYFPRGHGHMLECLGDKPAHFILIFDNGYFSEFGTFSITDWIGHTPKALLAKNFKLPESAFDGFPKKEVYFARGAVPPATPAAPLQGLKLPPLTHKYELLEQEPHKVFKGGREWRVDSTRFPISKTVTGVVLDLEPGALRELHWHPNADEWQYVIDGNISVTMFGSHGRVRTEQMEKGDVGYIPQGYGHSIENVGDRPCRVLIGFNTGNYQAIDLSQWIAGNPADVLATNFSKPTSLFEKFPKQDVFIAPGK

SEQ ID NO: 1259 - DNA, 1077 bp, synthetic construct
  misc_feature 1..1077: note = Variant of oxalate decarboxylase from Gemmata sp. SH-PL17
  source 1..1077: mol_type = other DNA
atgggtgaccctacctttatgaacaatgtaccagaccctctgctgtcgatgaaagatttgccgacgttcaagtttgagctggaaaagagcaagggcaaagtcattggggggagttcgggaaaagaagcaaccgttgtccagttacctatctccaaaggcattgctggtgtgagcatggtacttgaaccgggtgcgatgcgcgaattgcactggcatgccacagcagcagagtgggggttcgtattatggggccacgtccgtacgacggtgatcgatccacaaggtctggccgaaaccaacgactttggaccgggcgacgtgtggtattttcctcgcggtcatgggcacatgctggaatgcctgggcgataaaccggcgcatttcattctgatcttcgataacggctacttctcagagtttggcaccttctctattactgactggatcggtcacacaccgaaagcgcttctcgccaagaactttaagctgcccgaaagcgcttttgatgggtttcccaaaaaagaggtctattttgcacgtggcgcggttccaccagccacccctgcagcgcctttacagggactgaagctgccaccactcacgcataaatacgaactcctcgaacaagaacctcataaagtttttaaaggtggtcgtgaatggcgcgtggatagcactcgttttcccatttccaagactgtaaccggcgttgttcttgatttggaacccggcgcgttacgcgagcttcactggcatcctaatgctgacgagtggcaatatgtgatcgatggcaacattagtgtgacgatgttcggttctcatggccgtgtacgcaccgaacagatggagaagggtgatgtcgggtatattccacaggggtatggccacagcatcgaaaatgttggagatcgtccttgtcgcgtcttgattggctttaacacaggtaactaccaagcgatcgacttatcacagtggattgcaggtaatcccgcggatgttcttgccacgaacttctccaaacccaccagcctctttgaaaagttcccaaaacaggacgtgtttattgctcctggcaag

SEQ ID NO: 1260 - protein, 359 aa, synthetic construct
  REGION 1..359: note = Variant of oxalate decarboxylase from Gemmata sp. SH-PL17
MGDPTFMNNVPDPLLSMKDLPTFKFELEKSKGKVIGGSSGKEATVVQLPISKGIAGVSMVLEPGAMRELHWHATAAEWGFVLWGHVRTTVIDPQGLAETNDFGPGDVWYFPRGHGHMLECLGDKPAHFILIFDNGYFSEFGTFSITDWIGHTPKALLAKNFKLPESAFDGFPKKEVYFARGAVPPATPAAPLQGLKLPPLTHKYELLEQEPHKVFKGGREWRVDSTRFPISKTVTGVVLDLEPGALRELHWHPNADEWQYVIDGNISVTMFGSHGRVRTEQMEKGDVGYIPQGYGHSIENVGDRPCRVLIGFNTGNYQAIDLSQWIAGNPADVLATNFSKPTSLFEKFPKQDVFIAPGK

SEQ ID NO: 1261 - DNA, 1077 bp, synthetic construct
  misc_feature 1..1077: note = Variant of oxalate decarboxylase from Gemmata sp. SH-PL17
  source 1..1077: mol_type = other DNA
atgggtgaccctacctttatgaacaatgtaccagaccctctgctggcgggcaaagatttgccgacgttcaagtttgagctggaaaagagcaagggcaaagtcattggggggagttcgggaaaagaagcaaccgttgtccagttacctatctccaaaggcattgctggtgtgagcatggtacttgaaccgggtgcgatgcgcgaattgcactggcatgccacagcagcagagtgggggttcgtattatggggccacgtccgtacgacggtgatcgatccacaaggtctggccgaaaccaacgactttggaccgggcgacgtgtggtattttcctcgcggtcatgggcacatgctggaatgcctgggcgataaaccggcgcatttcattctgatcttcgataacggctacttctcagagtttggcaccttctctattactgactggatcggtcacacaccgaaagcgcttctcgccaagaactttaagctgcccgaaagcgcttttgatgggtttcccaaaaaagaggtctattttgcacgtggcgcggttccaccagccacccctgcagcgcctttacagggactgaagctgccaccactcacgcataaatacgaactcctcgaacaagaacctcataaagtttttaaaggtggtcgtgaatggcgcgtggatagcactcgttttcccatttccaagactgtaaccggcgttgttcttgatttggaacccggcgcgttacgcgagcttcactggcatcctaatgctgacgagtggcaatatgtgatcgatggcaacattagtgtgacgatgttcggttctcatggccgtgtacgcaccgaacagatggagaagggtgatgtcgggtatattccacaggggtatggccacagcatcgaaaatgttggagatcgtccttgtcgcgtcttgattggctttaacacaggtaactaccaagcgatcgacttatcacagtggattgcaggtaatcccgcggatgttcttgccacgaacttctccaaacccaccagcctctttgaaaagttcccaaaacaggacgtgtttattgctcctggcaag

SEQ ID NO: 1262 - protein, 359 aa, synthetic construct
  REGION 1..359: note = Variant of oxalate decarboxylase from Gemmata sp. SH-PL17
MGDPTFMNNVPDPLLAGKDLPTFKFELEKSKGKVIGGSSGKEATVVQLPISKGIAGVSMVLEPGAMRELHWHATAAEWGFVLWGHVRTTVIDPQGLAETNDFGPGDVWYFPRGHGHMLECLGDKPAHFILIFDNGYFSEFGTFSITDWIGHTPKALLAKNFKLPESAFDGFPKKEVYFARGAVPPATPAAPLQGLKLPPLTHKYELLEQEPHKVFKGGREWRVDSTRFPISKTVTGVVLDLEPGALRELHWHPNADEWQYVIDGNISVTMFGSHGRVRTEQMEKGDVGYIPQGYGHSIENVGDRPCRVLIGFNTGNYQAIDLSQWIAGNPADVLATNFSKPTSLFEKFPKQDVFIAPGK

SEQ ID NO: 1263 - DNA, 1077 bp, synthetic construct
  misc_feature 1..1077: note = Variant of oxalate decarboxylase from Gemmata sp. SH-PL17
  source 1..1077: mol_type = other DNA
atgggtgaccctacctttatgaacaatgtaccagaccctctgctgtcgggcaaagatttgccgacgttcaagtttgagctggaaaagagcaagggcaaagtcattggggggagttcgggaaaagaagcaaccgttgtccagttacctatctccaaaggcattgctggtgtgagcatggtacttgaaccgggtgcgatgcgcgaattgcactggcatgccacagcagcagagtgggggttcgtattacctggccacgtccgtacgacggtgatcgatccacaaggtctggccgaaaccaacgactttggaccgggcgacgtgtggtattttcctcgcggtcatgggcacatgctggaatgcctgggcgataaaccggcgcatttcattctgatcttcgataacggctacttctcagagtttggcaccttctctattactgactggatcggtcacacaccgaaagcgcttctcgccaagaactttaagctgcccgaaagcgcttttgatgggtttcccaaaaaagaggtctattttgcacgtggcgcggttccaccagccacccctgcagcgcctttacagggactgaagctgccaccactcacgcataaatacgaactcctcgaacaagaacctcataaagtttttaaaggtggtcgtgaatggcgcgtggatagcactcgttttcccatttccaagactgtaaccggcgttgttcttgatttggaacccggcgcgttacgcgagcttcactggcatcctaatgctgacgagtggcaatatgtgatcgatggcaacattagtgtgacgatgttcggttctcatggccgtgtacgcaccgaacagatggagaagggtgatgtcgggtatattccacaggggtatggccacagcatcgaaaatgttggagatcgtccttgtcgcgtcttgattggctttaacacaggtaactaccaagcgatcgacttatcacagtggattgcaggtaatcccgcggatgttcttgccacgaacttctccaaacccaccagcctctttgaaaagttcccaaaacaggacgtgtttattgctcctggcaag

SEQ ID NO: 1264 - protein, 359 aa, synthetic construct
  REGION 1..359: note = Variant of oxalate decarboxylase from Gemmata sp. SH-PL17
MGDPTFMNNVPDPLLSGKDLPTFKFELEKSKGKVIGGSSGKEATVVQLPISKGIAGVSMVLEPGAMRELHWHATAAEWGFVLPGHVRTTVIDPQGLAETNDFGPGDVWYFPRGHGHMLECLGDKPAHFILIFDNGYFSEFGTFSITDWIGHTPKALLAKNFKLPESAFDGFPKKEVYFARGAVPPATPAAPLQGLKLPPLTHKYELLEQEPHKVFKGGREWRVDSTRFPISKTVTGVVLDLEPGALRELHWHPNADEWQYVIDGNISVTMFGSHGRVRTEQMEKGDVGYIPQGYGHSIENVGDRPCRVLIGFNTGNYQAIDLSQWIAGNPADVLATNFSKPTSLFEKFPKQDVFIAPGK

SEQ ID NO: 1265 - DNA, 1077 bp, synthetic construct
  misc_feature 1..1077: note = Variant of oxalate decarboxylase from Gemmata sp. SH-PL17
  source 1..1077: mol_type = other DNA
atgggtgaccctacctttatgaacaatgtaccagaccctctgctgtcgggcaaagatttgccgacgttcaagtttgagctggaaaagagcaagggcaaagtcattggggggagttcgggaaaagaagcaaccgttgtccagttacctatctccaaaggcattgctggtgtgagcatggtacttgaaccgggtgcgatgcgcgaattgcactggcatgccacagcagcagagtgggggttcgtattatggggccacgtccgtacgacggtgatcgatccacaaggtctggccgaaaccaacgactttggaccgggcgacgtgtggtattttcctcgcggtcatgggcacatgctggaatgcctgggcgataaaccggcgcatttcattctgatcttcgataacggctacttctcagagtttggcaccttctctattactgactggatcggtcacacaccgaaagcgcttctcgccaagaactttaagctgcccgaaagcgcttttgatgggtttcccaaaaaagaggtctattttgcacgtggcgcggttccaccagccacccctgcagcgcctttacagggactgaagctgccaccactcacgcataaatacgaactcctcgaacaagaacctcataaagtttttaaaggtggtcgtgaatggcgcgtggatagcactcgttttcccatttccaagactgtaaccggcgttgttcttgatttggaacccggcgcgttacgcgagcttcactggcatcctaatgctgacgagtggcaatatgtgatcgatggcaacattagtgtgacgatgttcggttctcatggccgtgtacgcaccgaacagatggagaagggtgatgtcgggtatattccacaggggtatggccacagcatcgaaaatgttggagatcgtccttgtcgcgtcttgattggctttaacacaggtaactaccttgcgatcgacttatcacagtggattgcaggtaatcccgcggatgttcttgccacgaacttctccaaacccaccagcctctttgaaaagttcccaaaacaggacgtgtttattgctcctggcaag

SEQ ID NO: 1266 - protein, 359 aa, synthetic construct
  REGION 1..359: note = Variant of oxalate decarboxylase from Gemmata sp. SH-PL17
MGDPTFMNNVPDPLLSGKDLPTFKFELEKSKGKVIGGSSGKEATVVQLPISKGIAGVSMVLEPGAMRELHWHATAAEWGFVLWGHVRTTVIDPQGLAETNDFGPGDVWYFPRGHGHMLECLGDKPAHFILIFDNGYFSEFGTFSITDWIGHTPKALLAKNFKLPESAFDGFPKKEVYFARGAVPPATPAAPLQGLKLPPLTHKYELLEQEPHKVFKGGREWRVDSTRFPISKTVTGVVLDLEPGALRELHWHPNADEWQYVIDGNISVTMFGSHGRVRTEQMEKGDVGYIPQGYGHSIENVGDRPCRVLIGFNTGNYLAIDLSQWIAGNPADVLATNFSKPTSLFEKFPKQDVFIAPGK

SEQ ID NO: 1267 - DNA, 1077 bp, synthetic construct
  misc_feature 1..1077: note = Variant of oxalate decarboxylase from Gemmata sp. SH-PL17
  source 1..1077: mol_type = other DNA
atgggtgaccctacctttatgaacaatgtaccagaccctctgctgtcgggcaaagatttgccgacgttcaagtttgagctggaaaagagcaagggcaaagtcattggggggagttcgggaaaagaagcaaccgttgtccagttacctatctccaaaggcattgctggtgtgagcatggtacttgaaccgggtgcgatgcgcgaattgcactggcatgccacagcagcagagtggcagttcgtattatggggccacgtccgtacgacggtgatcgatccacaaggtctggccgaaaccaacgactttggaccgggcgacgtgtggtattttcctcgcggtcatgggcacatgctggaatgcctgggcgataaaccggcgcatttcattctgatcttcgataacggctacttctcagagtttggcaccttctctattactgactggatcggtcacacaccgaaagcgcttctcgccaagaactttaagctgcccgaaagcgcttttgatgggtttcccaaaaaagaggtctattttgcacgtggcgcggttccaccagccacccctgcagcgcctttacagggactgaagctgccaccactcacgcataaatacgaactcctcgaacaagaacctcataaagtttttaaaggtggtcgtgaatggcgcgtggatagcactcgttttcccatttccaagactgtaaccggcgttgttcttgatttggaacccggcgcgttacgcgagcttcactggcatcctaatgctgacgagtggcaatatgtgatcgatggcaacattagtgtgacgatgttcggttctcatggccgtgtacgcaccgaacagatggagaagggtgatgtcgggtatattccacaggggtatggccacagcatcgaaaatgttggagatcgtccttgtcgcgtcttgattggctttaacacaggtaactaccaagcgatcgacttatcacagtggattgcaggtaatcccgcggatgttcttgccacgaacttctccaaacccaccagcctctttgaaaagttcccaaaacaggacgtgtttattgctcctggcaag

SEQ ID NO: 1268 - protein, 359 aa, synthetic construct
  REGION 1..359: note = Variant of oxalate decarboxylase from Gemmata sp. SH-PL17
MGDPTFMNNVPDPLLSGKDLPTFKFELEKSKGKVIGGSSGKEATVVQLPISKGIAGVSMVLEPGAMRELHWHATAAEWQFVLWGHVRTTVIDPQGLAETNDFGPGDVWYFPRGHGHMLECLGDKPAHFILIFDNGYFSEFGTFSITDWIGHTPKALLAKNFKLPESAFDGFPKKEVYFARGAVPPATPAAPLQGLKLPPLTHKYELLEQEPHKVFKGGREWRVDSTRFPISKTVTGVVLDLEPGALRELHWHPNADEWQYVIDGNISVTMFGSHGRVRTEQMEKGDVGYIPQGYGHSIENVGDRPCRVLIGFNTGNYQAIDLSQWIAGNPADVLATNFSKPTSLFEKFPKQDVFIAPGK

SEQ ID NO: 1269 - DNA, 1077 bp, synthetic construct
  misc_feature 1..1077: note = Variant of oxalate decarboxylase from Gemmata sp. SH-PL17
  source 1..1077: mol_type = other DNA
atgggtgaccctacctttatgaacaatgtaccagaccctctgctgtcgtcgaaagatttgccgacgttcaagtttgagctggaaaagagcaagggcaaagtcattggggggagttcgggaaaagaagcaaccgttgtccagttacctatctccaaaggcattgctggtgtgagcatggtacttgaaccgggtgcgatgcgcgaattgcactggcatgccacagcagcagagtgggggttcgtattatggggccacgtccgtacgacggtgatcgatccacaaggtctggccgaaaccaacgactttggaccgggcgacgtgtggtattttcctcgcggtcatgggcacatgctggaatgcctgggcgataaaccggcgcatttcattctgatcttcgataacggctacttctcagagtttggcaccttctctattactgactggatcggtcacacaccgaaagcgcttctcgccaagaactttaagctgcccgaaagcgcttttgatgggtttcccaaaaaagaggtctattttgcacgtggcgcggttccaccagccacccctgcagcgcctttacagggactgaagctgccaccactcacgcataaatacgaactcctcgaacaagaacctcataaagtttttaaaggtggtcgtgaatggcgcgtggatagcactcgttttcccatttccaagactgtaaccggcgttgttcttgatttggaacccggcgcgttacgcgagcttcactggcatcctaatgctgacgagtggcaatatgtgatcgatggcaacattagtgtgacgatgttcggttctcatggccgtgtacgcaccgaacagatggagaagggtgatgtcgggtatattccacaggggtatggccacagcatcgaaaatgttggagatcgtccttgtcgcgtcttgattggctttaacacaggtaactaccaagcgatcgacttatcacagtggattgcaggtaatcccgcggatgttcttgccacgaacttctccaaacccaccagcctctttgaaaagttcccaaaacaggacgtgtttattgctcctggcaag

SEQ ID NO: 1270 - protein, 359 aa, synthetic construct
  REGION 1..359: note = Variant of oxalate decarboxylase from Gemmata sp. SH-PL17
MGDPTFMNNVPDPLLSSKDLPTFKFELEKSKGKVIGGSSGKEATVVQLPISKGIAGVSMVLEPGAMRELHWHATAAEWGFVLWGHVRTTVIDPQGLAETNDFGPGDVWYFPRGHGHMLECLGDKPAHFILIFDNGYFSEFGTFSITDWIGHTPKALLAKNFKLPESAFDGFPKKEVYFARGAVPPATPAAPLQGLKLPPLTHKYELLEQEPHKVFKGGREWRVDSTRFPISKTVTGVVLDLEPGALRELHWHPNADEWQYVIDGNISVTMFGSHGRVRTEQMEKGDVGYIPQGYGHSIENVGDRPCRVLIGFNTGNYQAIDLSQWIAGNPADVLATNFSKPTSLFEKFPKQDVFIAPGK

SEQ ID NO: 1271 - DNA, 1077 bp, synthetic construct
  misc_feature 1..1077: note = Variant of oxalate decarboxylase from Gemmata sp. SH-PL17
  source 1..1077: mol_type = other DNA
atgggtgaccctacctttatgaacaatgtaccagaccctctgctgtcgggcaaagatttgccgacgttcaagttttggctggaaaagagcaagggcaaagtcattggggggagttcgggaaaagaagcaaccgttgtccagttacctatctccaaaggcattgctggtgtgagcatggtacttgaaccgggtgcgatgcgcgaattgcactggcatgccacagcagcagagtgggggttcgtattatggggccacgtccgtacgacggtgatcgatccacaaggtctggccgaaaccaacgactttggaccgggcgacgtgtggtattttcctcgcggtcatgggcacatgctggaatgcctgggcgataaaccggcgcatttcattctgatcttcgataacggctacttctcagagtttggcaccttctctattactgactggatcggtcacacaccgaaagcgcttctcgccaagaactttaagctgcccgaaagcgcttttgatgggtttcccaaaaaagaggtctattttgcacgtggcgcggttccaccagccacccctgcagcgcctttacagggactgaagctgccaccactcacgcataaatacgaactcctcgaacaagaacctcataaagtttttaaaggtggtcgtgaatggcgcgtggatagcactcgttttcccatttccaagactgtaaccggcgttgttcttgatttggaacccggcgcgttacgcgagcttcactggcatcctaatgctgacgagtggcaatatgtgatcgatggcaacattagtgtgacgatgttcggttctcatggccgtgtacgcaccgaacagatggagaagggtgatgtcgggtatattccacaggggtatggccacagcatcgaaaatgttggagatcgtccttgtcgcgtcttgattggctttaacacaggtaactaccaagcgatcgacttatcacagtggattgcaggtaatcccgcggatgttcttgccacgaacttctccaaacccaccagcctctttgaaaagttcccaaaacaggacgtgtttattgctcctggcaag

SEQ ID NO: 1272 - protein, 359 aa, synthetic construct
  REGION 1..359: note = Variant of oxalate decarboxylase from Gemmata sp. SH-PL17
MGDPTFMNNVPDPLLSGKDLPTFKFWLEKSKGKVIGGSSGKEATVVQLPISKGIAGVSMVLEPGAMRELHWHATAAEWGFVLWGHVRTTVIDPQGLAETNDFGPGDVWYFPRGHGHMLECLGDKPAHFILIFDNGYFSEFGTFSITDWIGHTPKALLAKNFKLPESAFDGFPKKEVYFARGAVPPATPAAPLQGLKLPPLTHKYELLEQEPHKVFKGGREWRVDSTRFPISKTVTGVVLDLEPGALRELHWHPNADEWQYVIDGNISVTMFGSHGRVRTEQMEKGDVGYIPQGYGHSIENVGDRPCRVLIGFNTGNYQAIDLSQWIAGNPADVLATNFSKPTSLFEKFPKQDVFIAPGK

SEQ ID NO: 1273 - DNA, 1077 bp, synthetic construct
  misc_feature 1..1077: note = Variant of oxalate decarboxylase from Gemmata sp. SH-PL17
  source 1..1077: mol_type = other DNA
atgggtgaccctacctttatgaacaatgtaccagaccctctgctgtcgggcaaagatttgccgacgttcaagtttgagctggaaaagagcaagggcaaagtcattggggggagttcgggaaaagaagcaaccgttgtccagttacctatctccaaaggcattgctggtgtgagcatggtacttgaaccgggtgcgatgcgcgaattgcactggcatgccacagcagcagagtgggggttcgtattatggggccacgtccgtacgacggtgatcgatccacaaggtctggccgaaaccaacgactttggaccgggcgacgtgtggtattttcctcgcggtcatgggcacatgctggaatgcctgggcgataaaccggcgcatttcattctgatcttcgataacggctacttctcagagtttggcaccttctctattactgactggatcggtcacacaccgaaagcgcttctcgccaagaactttaagctgcccgaaagcgcttttgatgggtttcccaaaaaagaggtctattttgcacgtggcgcggttccaccagccacccctgcagcgcctttacagggagataagctgccaccactcacgcataaatacgaactcctcgaacaagaacctcataaagtttttaaaggtggtcgtgaatggcgcgtggatagcactcgttttcccatttccaagactgtaaccggcgttgttcttgatttggaacccggcgcgttacgcgagcttcactggcatcctaatgctgacgagtggcaatatgtgatcgatggcaacattagtgtgacgatgttcggttctcatggccgtgtacgcaccgaacagatggagaagggtgatgtcgggtatattccacaggggtatggccacagcatcgaaaatgttggagatcgtccttgtcgcgtcttgattggctttaacacaggtaactaccaagcgatcgacttatcacagtggattgcaggtaatcccgcggatgttcttgccacgaacttctccaaacccaccagcctctttgaaaagttcccaaaacaggacgtgtttattgctcctggcaag

SEQ ID NO: 1274 - protein, 359 aa, synthetic construct
  REGION 1..359: note = Variant of oxalate decarboxylase from Gemmata sp. SH-PL17
MGDPTFMNNVPDPLLSGKDLPTFKFELEKSKGKVIGGSSGKEATVVQLPISKGIAGVSMVLEPGAMRELHWHATAAEWGFVLWGHVRTTVIDPQGLAETNDFGPGDVWYFPRGHGHMLECLGDKPAHFILIFDNGYFSEFGTFSITDWIGHTPKALLAKNFKLPESAFDGFPKKEVYFARGAVPPATPAAPLQGDKLPPLTHKYELLEQEPHKVFKGGREWRVDSTRFPISKTVTGVVLDLEPGALRELHWHPNADEWQYVIDGNISVTMFGSHGRVRTEQMEKGDVGYIPQGYGHSIENVGDRPCRVLIGFNTGNYQAIDLSQWIAGNPADVLATNFSKPTSLFEKFPKQDVFIAPGK

SEQ ID NO: 1275 - DNA, 1077 bp, synthetic construct
  misc_feature 1..1077: note = Variant of oxalate decarboxylase from Gemmata sp. SH-PL17
  source 1..1077: mol_type = other DNA
atgggtgaccctacctttatgaacaatgtaccagaccctctgctgtcgggcaaagatttgccgacgttcaagtttgagctggaaaagagcaagggcaaagtcattggggggagttcgggaaaagaagcaaccgttgtccagttacctatctccaaaggcattgctggtgtgagcatggtacttgaaccgggtgcgatgcgcgaattgcactggcatgccacagcagcagagtgggggttcgtattatggggccacgtccgtacgacggtgatcgatccacaaggtctggccgaaaccaacgactttggaccgggcgacgtgtggtattttcctcgcggtcatgggcacatgctggaatgcctgggcgataaaccggcgcatttcattctgatcttcgataacggctacttctcagagtttggcaccttctctattactgactggatcggtcacacaccgaaagcgcttctcgccaagaactttaagctgcccgaaagcgcttttgatgggtttcccaaaaaagaggtctattttgcacgtggcgcggttccaccagccacccctgcagcgcctttacagggatggaagctgccaccactcacgcataaatacgaactcctcgaacaagaacctcataaagtttttaaaggtggtcgtgaatggcgcgtggatagcactcgttttcccatttccaagactgtaaccggcgttgttcttgatttggaacccggcgcgttacgcgagcttcactggcatcctaatgctgacgagtggcaatatgtgatcgatggcaacattagtgtgacgatgttcggttctcatggccgtgtacgcaccgaacagatggagaagggtgatgtcgggtatattccacaggggtatggccacagcatcgaaaatgttggagatcgtccttgtcgcgtcttgattggctttaacacaggtaactaccaagcgatcgacttatcacagtggattgcaggtaatcccgcggatgttcttgccacgaacttctccaaacccaccagcctctttgaaaagttcccaaaacaggacgtgtttattgctcctggcaag

SEQ ID NO: 1276 - protein, 359 aa, synthetic construct
  REGION 1..359: note = Variant of oxalate decarboxylase from Gemmata sp. SH-PL17
MGDPTFMNNVPDPLLSGKDLPTFKFELEKSKGKVIGGSSGKEATVVQLPISKGIAGVSMVLEPGAMRELHWHATAAEWGFVLWGHVRTTVIDPQGLAETNDFGPGDVWYFPRGHGHMLECLGDKPAHFILIFDNGYFSEFGTFSITDWIGHTPKALLAKNFKLPESAFDGFPKKEVYFARGAVPPATPAAPLQGWKLPPLTHKYELLEQEPHKVFKGGREWRVDSTRFPISKTVTGVVLDLEPGALRELHWHPNADEWQYVIDGNISVTMFGSHGRVRTEQMEKGDVGYIPQGYGHSIENVGDRPCRVLIGFNTGNYQAIDLSQWIAGNPADVLATNFSKPTSLFEKFPKQDVFIAPGK

SEQ ID NO: 1277 - DNA, 1077 bp, synthetic construct
  misc_feature 1..1077: note = Variant of oxalate decarboxylase from Gemmata sp. SH-PL17
  source 1..1077: mol_type = other DNA
atgggtgaccctacctttatgaacaatgtaccagaccctctgctgtcgggcaaagatttgccgacgttcaagtttgagctggaaaagagcaagggcaaagtcattggggggagttcgggaaaagaagcaaccgttgtccagttacctatctccaaaggcattgctggtgtgagcatggtacttgaaccgggtgcgatgcgcgaattgcactggcatgccacagcagcagagtgggggttcgtattatggggccacgtccgtacgacggtgatcgatccacaaggtctggccgaaaccaacgactttggaccgggcgacgtgtggtattttcctcgcggtcatgggcacatgctggaatgcctgggcgataaaccggcgcatttcattctgatcttcgataacggctacttctcagagtttggcaccttctctattactgactggatcggtcacacaccgaaagcgcttctcgccaagaactttaagctgcccgaaagcgcttttgatgggtttcccaaaaaagaggtctattttgcacgtggcgcggttccaccagccacccctgcagcgcctttacagggactgaagctgccaccactcacgcataaatacgaactcctcgaacaagaacctcataaagtttttaaaggtggtcgtgaatggcgcgtggatagcactcgttttcccatttccaagactgtaaccggcgttgttcttgatttggaacccggcgcgttacgcgagcttcactggcatcctaatgctgacgagtggcaatatgtgatcgatggcaacattagtgtgacgatgttcggttctcatggccgttcgcgcaccgaacagatggagaagggtgatgtcgggtatattccacaggggtatggccacagcatcgaaaatgttggagatcgtccttgtcgcgtcttgattggctttaacacaggtaactaccaagcgatcgacttatcacagtggattgcaggtaatcccgcggatgttcttgccacgaacttctccaaacccaccagcctctttgaaaagttcccaaaacaggacgtgtttattgctcctggcaag

SEQ ID NO: 1278 - protein, 359 aa, synthetic construct
  REGION 1..359: note = Variant of oxalate decarboxylase from Gemmata sp. SH-PL17
MGDPTFMNNVPDPLLSGKDLPTFKFELEKSKGKVIGGSSGKEATVVQLPISKGIAGVSMVLEPGAMRELHWHATAAEWGFVLWGHVRTTVIDPQGLAETNDFGPGDVWYFPRGHGHMLECLGDKPAHFILIFDNGYFSEFGTFSITDWIGHTPKALLAKNFKLPESAFDGFPKKEVYFARGAVPPATPAAPLQGLKLPPLTHKYELLEQEPHKVFKGGREWRVDSTRFPISKTVTGVVLDLEPGALRELHWHPNADEWQYVIDGNISVTMFGSHGRSRTEQMEKGDVGYIPQGYGHSIENVGDRPCRVLIGFNTGNYQAIDLSQWIAGNPADVLATNFSKPTSLFEKFPKQDVFIAPGK

SEQ ID NO: 1279 - DNA, 1077 bp, synthetic construct
  misc_feature 1..1077: note = Variant of oxalate decarboxylase from Gemmata sp. SH-PL17
  source 1..1077: mol_type = other DNA
atgggtgaccctacctttatgaacaatgtaccagaccctctgctgtcgggcaaagatttgccgacgttcaagtttgagctggaaaagagcaagggcaaagtcattggggggagttcgggaaaagaagcaaccgttgtccagttacctatctccaaaggcattgctggtgtgagcatggtacttgaaccgggtgcgatgcgcgaattgcactggcatgccacagcagcagagtgggggttcgtattatggggccacgtccgtacgacggtgatcgatccacaaggtctggccgaaaccaacgactttggaccgggcgacgtgtggtattttcctcgcggtcatgggcacatgctggaatgcctgggcgataaaccggcgcatttcattctgatcttcgataacggctacttctcagagtttggcaccttctctattactgactggatcggtcacacaccgaaagcgcttctcgccaagaactttaagctgcccgaaagcgcttttgatgggtttcccaaagaggaggtctattttgcacgtggcgcggttccaccagccacccctgcagcgcctttacagggactgaagctgccaccactcacgcataaatacgaactcctcgaacaagaacctcataaagtttttaaaggtggtcgtgaatggcgcgtggatagcactcgttttcccatttccaagactgtaaccggcgttgttcttgatttggaacccggcgcgttacgcgagcttcactggcatcctaatgctgacgagtggcaatatgtgatcgatggcaacattagtgtgacgatgttcggttctcatggccgtgtacgcaccgaacagatggagaagggtgatgtcgggtatattccacaggggtatggccacagcatcgaaaatgttggagatcgtccttgtcgcgtcttgattggctttaacacaggtaactaccaagcgatcgacttatcacagtggattgcaggtaatcccgcggatgttcttgccacgaacttctccaaacccaccagcctctttgaaaagttcccaaaacaggacgtgtttattgctcctggcaag

SEQ ID NO: 1280 - protein, 359 aa, synthetic construct
  REGION 1..359: note = Variant of oxalate decarboxylase from Gemmata sp. SH-PL17
MGDPTFMNNVPDPLLSGKDLPTFKFELEKSKGKVIGGSSGKEATVVQLPISKGIAGVSMVLEPGAMRELHWHATAAEWGFVLWGHVRTTVIDPQGLAETNDFGPGDVWYFPRGHGHMLECLGDKPAHFILIFDNGYFSEFGTFSITDWIGHTPKALLAKNFKLPESAFDGFPKEEVYFARGAVPPATPAAPLQGLKLPPLTHKYELLEQEPHKVFKGGREWRVDSTRFPISKTVTGVVLDLEPGALRELHWHPNADEWQYVIDGNISVTMFGSHGRVRTEQMEKGDVGYIPQGYGHSIENVGDRPCRVLIGFNTGNYQAIDLSQWIAGNPADVLATNFSKPTSLFEKFPKQDVFIAPGK

SEQ ID NO: 1281 - DNA, 1077 bp, synthetic construct
  misc_feature 1..1077: note = Variant of oxalate decarboxylase from Gemmata sp. SH-PL17
  source 1..1077: mol_type = other DNA
atgggtgaccctacctttatgaacaatgtaccagaccctctgctggagggcaaagatttgccgacgttcaagtttgagctggaaaagagcaagggcaaagtcattggggggagttcgggaaaagaagcaaccgttgtccagttacctatctccaaaggcattgctggtgtgagcatggtacttgaaccgggtgcgatgcgcgaattgcactggcatgccacagcagcagagtgggggttcgtattatggggccacgtccgtacgacggtgatcgatccacaaggtctggccgaaaccaacgactttggaccgggcgacgtgtggtattttcctcgcggtcatgggcacatgctggaatgcctgggcgataaaccggcgcatttcattctgatcttcgataacggctacttctcagagtttggcaccttctctattactgactggatcggtcacacaccgaaagcgcttctcgccaagaactttaagctgcccgaaagcgcttttgatgggtttcccaaaaaagaggtctattttgcacgtggcgcggttccaccagccacccctgcagcgcctttacagggactgaagctgccaccactcacgcataaatacgaactcctcgaacaagaacctcataaagtttttaaaggtggtcgtgaatggcgcgtggatagcactcgttttcccatttccaagactgtaaccggcgttgttcttgatttggaacccggcgcgttacgcgagcttcactggcatcctaatgctgacgagtggcaatatgtgatcgatggcaacattagtgtgacgatgttcggttctcatggccgtgtacgcaccgaacagatggagaagggtgatgtcgggtatattccacaggggtatggccacagcatcgaaaatgttggagatcgtccttgtcgcgtcttgattggctttaacacaggtaactaccaagcgatcgacttatcacagtggattgcaggtaatcccgcggatgttcttgccacgaacttctccaaacccaccagcctctttgaaaagttcccaaaacaggacgtgtttattgctcctggcaag

SEQ ID NO: 1282 - protein, 359 aa, synthetic construct
  REGION 1..359: note = Variant of oxalate decarboxylase from Gemmata sp. SH-PL17
MGDPTFMNNVPDPLLEGKDLPTFKFELEKSKGKVIGGSSGKEATVVQLPISKGIAGVSMVLEPGAMRELHWHATAAEWGFVLWGHVRTTVIDPQGLAETNDFGPGDVWYFPRGHGHMLECLGDKPAHFILIFDNGYFSEFGTFSITDWIGHTPKALLAKNFKLPESAFDGFPKKEVYFARGAVPPATPAAPLQGLKLPPLTHKYELLEQEPHKVFKGGREWRVDSTRFPISKTVTGVVLDLEPGALRELHWHPNADEWQYVIDGNISVTMFGSHGRVRTEQMEKGDVGYIPQGYGHSIENVGDRPCRVLIGFNTGNYQAIDLSQWIAGNPADVLATNFSKPTSLFEKFPKQDVFIAPGK

SEQ ID NO: 1283 - DNA, 1077 bp, synthetic construct
  misc_feature 1..1077: note = Variant of oxalate decarboxylase from Gemmata sp. SH-PL17
  source 1..1077: mol_type = other DNA
atgggtgaccctacctttatgaacaatgtaccagaccctctgctgtcgggcaaagatttgccgacgttcaagtttgagctggaaaagagcaagggcaaagtcattggggggagttcgggaaaagaagcaaccgttgtccagttacctatctccaaaggcattgctggtgtgagcatggtacttgaaccgggtgcgatgcgcgaattgcactggcatgccacagcagcagagtgggggttcgtattatggggccacgtccgtacgacggtgatcgatccacaaggtctggccgaaaccaacgactttggaccgggcgacgtgtggtattttcctcgcggtcatgggcacatgctggaatgcctgggcgataaaccggcgcatttcattctgatcttcgataacggctacttctcagagtttggcaccttctctattactgactggatcggtcacacaccgaaagcgcttctcgccaagaacttttttctgcccgaaagcgcttttgatgggtttcccaaaaaagaggtctattttgcacgtggcgcggttccaccagccacccctgcagcgcctttacagggactgaagctgccaccactcacgcataaatacgaactcctcgaacaagaacctcataaagtttttaaaggtggtcgtgaatggcgcgtggatagcactcgttttcccatttccaagactgtaaccggcgttgttcttgatttggaacccggcgcgttacgcgagcttcactggcatcctaatgctgacgagtggcaatatgtgatcgatggcaacattagtgtgacgatgttcggttctcatggccgtgtacgcaccgaacagatggagaagggtgatgtcgggtatattccacaggggtatggccacagcatcgaaaatgttggagatcgtccttgtcgcgtcttgattggctttaacacaggtaactaccaagcgatcgacttatcacagtggattgcaggtaatcccgcggatgttcttgccacgaacttctccaaacccaccagcctctttgaaaagttcccaaaacaggacgtgtttattgctcctggcaag

SEQ ID NO: 1284 - protein, 359 aa, synthetic construct
  REGION 1..359: note = Variant of oxalate decarboxylase from Gemmata sp. SH-PL17
MGDPTFMNNVPDPLLSGKDLPTFKFELEKSKGKVIGGSSGKEATVVQLPISKGIAGVSMVLEPGAMRELHWHATAAEWGFVLWGHVRTTVIDPQGLAETNDFGPGDVWYFPRGHGHMLECLGDKPAHFILIFDNGYFSEFGTFSITDWIGHTPKALLAKNFFLPESAFDGFPKKEVYFARGAVPPATPAAPLQGLKLPPLTHKYELLEQEPHKVFKGGREWRVDSTRFPISKTVTGVVLDLEPGALRELHWHPNADEWQYVIDGNISVTMFGSHGRVRTEQMEKGDVGYIPQGYGHSIENVGDRPCRVLIGFNTGNYQAIDLSQWIAGNPADVLATNFSKPTSLFEKFPKQDVFIAPGK

SEQ ID NO: 1285 - DNA, 1077 bp, synthetic construct
  misc_feature 1..1077: note = Variant of oxalate decarboxylase from Gemmata sp. SH-PL17
  source 1..1077: mol_type = other DNA
atgggtgaccctacctttatgaacaatgtaccagaccctctgctgtcgggcaaagatttgccgacgttcaagtttgagctggaaaagagcaagggcaaagtcattggggggagttcgggaaaagaagcaaccgttgtccagttacctatctccaaaggcattgctggtgtgagcatggtacttgaaccgggtgcgatgcgcgaattgcactggcatgccacagcagcagagtggtatttcgtattatggggccacgtccgtacgacggtgatcgatccacaaggtctggccgaaaccaacgactttggaccgggcgacgtgtggtattttcctcgcggtcatgggcacatgctggaatgcctgggcgataaaccggcgcatttcattctgatcttcgataacggctacttctcagagtttggcaccttctctattactgactggatcggtcacacaccgaaagcgcttctcgccaagaactttaagctgcccgaaagcgcttttgatgggtttcccaaaaaagaggtctattttgcacgtggcgcggttccaccagccacccctgcagcgcctttacagggactgaagctgccaccactcacgcataaatacgaactcctcgaacaagaacctcataaagtttttaaaggtggtcgtgaatggcgcgtggatagcactcgttttcccatttccaagactgtaaccggcgttgttcttgatttggaacccggcgcgttacgcgagcttcactggcatcctaatgctgacgagtggcaatatgtgatcgatggcaacattagtgtgacgatgttcggttctcatggccgtgtacgcaccgaacagatggagaagggtgatgtcgggtatattccacaggggtatggccacagcatcgaaaatgttggagatcgtccttgtcgcgtcttgattggctttaacacaggtaactaccaagcgatcgacttatcacagtggattgcaggtaatcccgcggatgttcttgccacgaacttctccaaacccaccagcctctttgaaaagttcccaaaacaggacgtgtttattgctcctggcaag

SEQ ID NO: 1286 - protein, 359 aa, synthetic construct
  REGION 1..359: note = Variant of oxalate decarboxylase from Gemmata sp. SH-PL17
MGDPTFMNNVPDPLLSGKDLPTFKFELEKSKGKVIGGSSGKEATVVQLPISKGIAGVSMVLEPGAMRELHWHATAAEWYFVLWGHVRTTVIDPQGLAETNDFGPGDVWYFPRGHGHMLECLGDKPAHFILIFDNGYFSEFGTFSITDWIGHTPKALLAKNFKLPESAFDGFPKKEVYFARGAVPPATPAAPLQGLKLPPLTHKYELLEQEPHKVFKGGREWRVDSTRFPISKTVTGVVLDLEPGALRELHWHPNADEWQYVIDGNISVTMFGSHGRVRTEQMEKGDVGYIPQGYGHSIENVGDRPCRVLIGFNTGNYQAIDLSQWIAGNPADVLATNFSKPTSLFEKFPKQDVFIAPGK

SEQ ID NO: 1287 - DNA, 1077 bp, synthetic construct
  misc_feature 1..1077: note = Variant of oxalate decarboxylase from Gemmata sp. SH-PL17
  source 1..1077: mol_type = other DNA
atgggtgaccctacctttatgaacaatgtaccagaccctctgctgtcgggcaaagatttgccgacgttcaagtttgagctggaaaagagcaagggcaaagtcattggggggagttcgggaaaagaagcaaccgttgtccagttacctatctccaaaggcattgctggtgtgagcatggtacttgaaccgggtgcgatgcgcgaattgcactggcatgccacagcagcagagtgggcgttcgtattatggggccacgtccgtacgacggtgatcgatccacaaggtctggccgaaaccaacgactttggaccgggcgacgtgtggtattttcctcgcggtcatgggcacatgctggaatgcctgggcgataaaccggcgcatttcattctgatcttcgataacggctacttctcagagtttggcaccttctctattactgactggatcggtcacacaccgaaagcgcttctcgccaagaactttaagctgcccgaaagcgcttttgatgggtttcccaaaaaagaggtctattttgcacgtggcgcggttccaccagccacccctgcagcgcctttacagggactgaagctgccaccactcacgcataaatacgaactcctcgaacaagaacctcataaagtttttaaaggtggtcgtgaatggcgcgtggatagcactcgttttcccatttccaagactgtaaccggcgttgttcttgatttggaacccggcgcgttacgcgagcttcactggcatcctaatgctgacgagtggcaatatgtgatcgatggcaacattagtgtgacgatgttcggttctcatggccgtgtacgcaccgaacagatggagaagggtgatgtcgggtatattccacaggggtatggccacagcatcgaaaatgttggagatcgtccttgtcgcgtcttgattggctttaacacaggtaactaccaagcgatcgacttatcacagtggattgcaggtaatcccgcggatgttcttgccacgaacttctccaaacccaccagcctctttgaaaagttcccaaaacaggacgtgtttattgctcctggcaag

SEQ ID NO: 1288 - protein, 359 aa, synthetic construct
  REGION 1..359: note = Variant of oxalate decarboxylase from Gemmata sp. SH-PL17
MGDPTFMNNVPDPLLSGKDLPTFKFELEKSKGKVIGGSSGKEATVVQLPISKGIAGVSMVLEPGAMRELHWHATAAEWAFVLWGHVRTTVIDPQGLAETNDFGPGDVWYFPRGHGHMLECLGDKPAHFILIFDNGYFSEFGTFSITDWIGHTPKALLAKNFKLPESAFDGFPKKEVYFARGAVPPATPAAPLQGLKLPPLTHKYELLEQEPHKVFKGGREWRVDSTRFPISKTVTGVVLDLEPGALRELHWHPNADEWQYVIDGNISVTMFGSHGRVRTEQMEKGDVGYIPQGYGHSIENVGDRPCRVLIGFNTGNYQAIDLSQWIAGNPADVLATNFSKPTSLFEKFPKQDVFIAPGK

SEQ ID NO: 1289 - DNA, 1077 bp, synthetic construct
  misc_feature 1..1077: note = Variant of oxalate decarboxylase from Gemmata sp. SH-PL17
  source 1..1077: mol_type = other DNA
atgggtgaccctacctttatgaacaatgtaccagaccctctgctgtcgtgtaaagatttgccgacgttcaagtttgagctggaaaagagcaagggcaaagtcattggggggagttcgggaaaagaagcaaccgttgtccagttacctatctccaaaggcattgctggtgtgagcatggtacttgaaccgggtgcgatgcgcgaattgcactggcatgccacagcagcagagtgggggttcgtattatggggccacgtccgtacgacggtgatcgatccacaaggtctggccgaaaccaacgactttggaccgggcgacgtgtggtattttcctcgcggtcatgggcacatgctggaatgcctgggcgataaaccggcgcatttcattctgatcttcgataacggctacttctcagagtttggcaccttctctattactgactggatcggtcacacaccgaaagcgcttctcgccaagaactttaagctgcccgaaagcgcttttgatgggtttcccaaaaaagaggtctattttgcacgtggcgcggttccaccagccacccctgcagcgcctttacagggactgaagctgccaccactcacgcataaatacgaactcctcgaacaagaacctcataaagtttttaaaggtggtcgtgaatggcgcgtggatagcactcgttttcccatttccaagactgtaaccggcgttgttcttgatttggaacccggcgcgttacgcgagcttcactggcatcctaatgctgacgagtggcaatatgtgatcgatggcaacattagtgtgacgatgttcggttctcatggccgtgtacgcaccgaacagatggagaagggtgatgtcgggtatattccacaggggtatggccacagcatcgaaaatgttggagatcgtccttgtcgcgtcttgattggctttaacacaggtaactaccaagcgatcgacttatcacagtggattgcaggtaatcccgcggatgttcttgccacgaacttctccaaacccaccagcctctttgaaaagttcccaaaacaggacgtgtttattgctcctggcaag

SEQ ID NO: 1290 - protein, 359 aa, synthetic construct
  REGION 1..359: note = Variant of oxalate decarboxylase from Gemmata sp. SH-PL17
MGDPTFMNNVPDPLLSCKDLPTFKFELEKSKGKVIGGSSGKEATVVQLPISKGIAGVSMVLEPGAMRELHWHATAAEWGFVLWGHVRTTVIDPQGLAETNDFGPGDVWYFPRGHGHMLECLGDKPAHFILIFDNGYFSEFGTFSITDWIGHTPKALLAKNFKLPESAFDGFPKKEVYFARGAVPPATPAAPLQGLKLPPLTHKYELLEQEPHKVFKGGREWRVDSTRFPISKTVTGVVLDLEPGALRELHWHPNADEWQYVIDGNISVTMFGSHGRVRTEQMEKGDVGYIPQGYGHSIENVGDRPCRVLIGFNTGNYQAIDLSQWIAGNPADVLATNFSKPTSLFEKFPKQDVFIAPGK

SEQ ID NO: 1291 - DNA, 1077 bp, synthetic construct
  misc_feature 1..1077: note = Variant of oxalate decarboxylase from Gemmata sp. SH-PL17
  source 1..1077: mol_type = other DNA
atgggtgaccctacctttatgaacaatgtaccagaccctctgctgtcgtataaagatttgccgacgttcaagtttgagctggaaaagagcaagggcaaagtcattggggggagttcgggaaaagaagcaaccgttgtccagttacctatctccaaaggcattgctggtgtgagcatggtacttgaaccgggtgcgatgcgcgaattgcactggcatgccacagcagcagagtgggggttcgtattatggggccacgtccgtacgacggtgatcgatccacaaggtctggccgaaaccaacgactttggaccgggcgacgtgtggtattttcctcgcggtcatgggcacatgctggaatgcctgggcgataaaccggcgcatttcattctgatcttcgataacggctacttctcagagtttggcaccttctctattactgactggatcggtcacacaccgaaagcgcttctcgccaagaactttaagctgcccgaaagcgcttttgatgggtttcccaaaaaagaggtctattttgcacgtggcgcggttccaccagccacccctgcagcgcctttacagggactgaagctgccaccactcacgcataaatacgaactcctcgaacaagaacctcataaagtttttaaaggtggtcgtgaatggcgcgtggatagcactcgttttcccatttccaagactgtaaccggcgttgttcttgatttggaacccggcgcgttacgcgagcttcactggcatcctaatgctgacgagtggcaatatgtgatcgatggcaacattagtgtgacgatgttcggttctcatggccgtgtacgcaccgaacagatggagaagggtgatgtcgggtatattccacaggggtatggccacagcatcgaaaatgttggagatcgtccttgtcgcgtcttgattggctttaacacaggtaactaccaagcgatcgacttatcacagtggattgcaggtaatcccgcggatgttcttgccacgaacttctccaaacccaccagcctctttgaaaagttcccaaaacaggacgtgtttattgctcctggcaag

SEQ ID NO: 1292 - protein, 359 aa, synthetic construct
  REGION 1..359: note = Variant of oxalate decarboxylase from Gemmata sp. SH-PL17
MGDPTFMNNVPDPLLSYKDLPTFKFELEKSKGKVIGGSSGKEATVVQLPISKGIAGVSMVLEPGAMRELHWHATAAEWGFVLWGHVRTTVIDPQGLAETNDFGPGDVWYFPRGHGHMLECLGDKPAHFILIFDNGYFSEFGTFSITDWIGHTPKALLAKNFKLPESAFDGFPKKEVYFARGAVPPATPAAPLQGLKLPPLTHKYELLEQEPHKVFKGGREWRVDSTRFPISKTVTGVVLDLEPGALRELHWHPNADEWQYVIDGNISVTMFGSHGRVRTEQMEKGDVGYIPQGYGHSIENVGDRPCRVLIGFNTGNYQAIDLSQWIAGNPADVLATNFSKPTSLFEKFPKQDVFIAPGK

SEQ ID NO: 1293 - DNA, 1077 bp, synthetic construct
  misc_feature 1..1077: note = Variant of oxalate decarboxylase from Gemmata sp. SH-PL17
  source 1..1077: mol_type = other DNA
atgggtgaccctacctttatgaacaatgtaccagaccctctgctgtcgggcaaagatttgccgacgttcaagtttgagctggaaaagagcaagggcaaagtcattggggggagttcgggaaaagaagcaaccgttgtccagttacctatctccaaaggcattgctggtgtgagcatggtacttgaaccgggtgcgatgcgcgaattgcactggcatgccacagcagcagagtgggggttcgtattatggggccacgtccgtacgacggtgatcgatccacaaggtctggccgaaaccaacgactttggaccgggcgacgtgtggtattttcctcgcggtcatgggcacatgctggaatgcctgggcgataaaccggcgcatttcattctgatcttcgataacggctacttctcagagtttggcaccttctctattactgactggatcggtcacacaccgaaagcgcttctcgccaagaactttaagctgcccgaaagcgcttttgatgggtttcccaaaaaagaggtctattttgcacgtggcgcggttccaccagccacccctgcagcgcctttacagggacagaagctgccaccactcacgcataaatacgaactcctcgaacaagaacctcataaagtttttaaaggtggtcgtgaatggcgcgtggatagcactcgttttcccatttccaagactgtaaccggcgttgttcttgatttggaacccggcgcgttacgcgagcttcactggcatcctaatgctgacgagtggcaatatgtgatcgatggcaacattagtgtgacgatgttcggttctcatggccgtgtacgcaccgaacagatggagaagggtgatgtcgggtatattccacaggggtatggccacagcatcgaaaatgttggagatcgtccttgtcgcgtcttgattggctttaacacaggtaactaccaagcgatcgacttatcacagtggattgcaggtaatcccgcggatgttcttgccacgaacttctccaaacccaccagcctctttgaaaagttcccaaaacaggacgtgtttattgctcctggcaag

SEQ ID NO: 1294 - protein, 359 aa, synthetic construct
  REGION 1..359: note = Variant of oxalate decarboxylase from Gemmata sp. SH-PL17
MGDPTFMNNVPDPLLSGKDLPTFKFELEKSKGKVIGGSSGKEATVVQLPISKGIAGVSMVLEPGAMRELHWHATAAEWGFVLWGHVRTTVIDPQGLAETNDFGPGDVWYFPRGHGHMLECLGDKPAHFILIFDNGYFSEFGTFSITDWIGHTPKALLAKNFKLPESAFDGFPKKEVYFARGAVPPATPAAPLQGQKLPPLTHKYELLEQEPHKVFKGGREWRVDSTRFPISKTVTGVVLDLEPGALRELHWHPNADEWQYVIDGNISVTMFGSHGRVRTEQMEKGDVGYIPQGYGHSIENVGDRPCRVLIGFNTGNYQAIDLSQWIAGNPADVLATNFSKPTSLFEKFPKQDVFIAPGK

SEQ ID NO: 1295 - DNA, 1077 bp, synthetic construct
  misc_feature 1..1077: note = Variant of oxalate decarboxylase from Gemmata sp. SH-PL17
  source 1..1077: mol_type = other DNA
atgggtgaccctacctttatgaacaatgtaccagaccctctgctgtcgggcaaagatttgccgacgttcaagtttccgctggaaaagagcaagggcaaagtcattggggggagttcgggaaaagaagcaaccgttgtccagttacctatctccaaaggcattgctggtgtgagcatggtacttgaaccgggtgcgatgcgcgaattgcactggcatgccacagcagcagagtgggggttcgtattatggggccacgtccgtacgacggtgatcgatccacaaggtctggccgaaaccaacgactttggaccgggcgacgtgtggtattttcctcgcggtcatgggcacatgctggaatgcctgggcgataaaccggcgcatttcattctgatcttcgataacggctacttctcagagtttggcaccttctctattactgactggatcggtcacacaccgaaagcgcttctcgccaagaactttaagctgcccgaaagcgcttttgatgggtttcccaaaaaagaggtctattttgcacgtggcgcggttccaccagccacccctgcagcgcctttacagggactgaagctgccaccactcacgcataaatacgaactcctcgaacaagaacctcataaagtttttaaaggtggtcgtgaatggcgcgtggatagcactcgttttcccatttccaagactgtaaccggcgttgttcttgatttggaacccggcgcgttacgcgagcttcactggcatcctaatgctgacgagtggcaatatgtgatcgatggcaacattagtgtgacgatgttcggttctcatggccgtgtacgcaccgaacagatggagaagggtgatgtcgggtatattccacaggggtatggccacagcatcgaaaatgttggagatcgtccttgtcgcgtcttgattggctttaacacaggtaactaccaagcgatcgacttatcacagtggattgcaggtaatcccgcggatgttcttgccacgaacttctccaaacccaccagcctctttgaaaagttcccaaaacaggacgtgtttattgctcctggcaag

SEQ ID NO: 1296 - protein, 359 aa, synthetic construct
  REGION 1..359: note = Variant of oxalate decarboxylase from Gemmata sp. SH-PL17
MGDPTFMNNVPDPLLSGKDLPTFKFPLEKSKGKVIGGSSGKEATVVQLPISKGIAGVSMVLEPGAMRELHWHATAAEWGFVLWGHVRTTVIDPQGLAETNDFGPGDVWYFPRGHGHMLECLGDKPAHFILIFDNGYFSEFGTFSITDWIGHTPKALLAKNFKLPESAFDGFPKKEVYFARGAVPPATPAAPLQGLKLPPLTHKYELLEQEPHKVFKGGREWRVDSTRFPISKTVTGVVLDLEPGALRELHWHPNADEWQYVIDGNISVTMFGSHGRVRTEQMEKGDVGYIPQGYGHSIENVGDRPCRVLIGFNTGNYQAIDLSQWIAGNPADVLATNFSKPTSLFEKFPKQDVFIAPGK

SEQ ID NO: 1297 - DNA, 1077 bp, synthetic construct
  misc_feature 1..1077: note = Variant of oxalate decarboxylase from Gemmata sp. SH-PL17
  source 1..1077: mol_type = other DNA
atgggtgaccctacctttatgaacaatgtaccagaccctctgctgtcgggcaaagatttgccgacgttcaagtttgagctggaaaagagcaagggcaaagtcattggggggagttcgggaaaagaagcaaccgttgtccagttacctatctccaaaggcattgctggtgtgagcatggtacttgaaccgggtgcgatgcgcgaattgcactggcatgccacagcagcagagtgggggttcgtattatggggccacgtccgtacgacggtgatcgatccacaaggtctggccgaaaccaacgactttggaccgggcgacgtgtggtattttcctcgcggtcatgggcacatgctggaatgcctgggcgataaaccggcgcatttcattctgatcttcgataacggctacttctcagagtttggcaccttctctattactgactggatcggtcacacaccgaaagcgcttctcgccaagaactttaagctgcccgaaagcgcttttgatgggtttcccaaaaaagaggtctattttgcacgtggcgcggttccaccagccacccctgcagcgcctttacagggaattaagctgccaccactcacgcataaatacgaactcctcgaacaagaacctcataaagtttttaaaggtggtcgtgaatggcgcgtggatagcactcgttttcccatttccaagactgtaaccggcgttgttcttgatttggaacccggcgcgttacgcgagcttcactggcatcctaatgctgacgagtggcaatatgtgatcgatggcaacattagtgtgacgatgttcggttctcatggccgtgtacgcaccgaacagatggagaagggtgatgtcgggtatattccacaggggtatggccacagcatcgaaaatgttggagatcgtccttgtcgcgtcttgattggctttaacacaggtaactaccaagcgatcgacttatcacagtggattgcaggtaatcccgcggatgttcttgccacgaacttctccaaacccaccagcctctttgaaaagttcccaaaacaggacgtgtttattgctcctggcaag

SEQ ID NO: 1298 - protein, 359 aa, synthetic construct
  REGION 1..359: note = Variant of oxalate decarboxylase from Gemmata sp. SH-PL17
MGDPTFMNNVPDPLLSGKDLPTFKFELEKSKGKVIGGSSGKEATVVQLPISKGIAGVSMVLEPGAMRELHWHATAAEWGFVLWGHVRTTVIDPQGLAETNDFGPGDVWYFPRGHGHMLECLGDKPAHFILIFDNGYFSEFGTFSITDWIGHTPKALLAKNFKLPESAFDGFPKKEVYFARGAVPPATPAAPLQGIKLPPLTHKYELLEQEPHKVFKGGREWRVDSTRFPISKTVTGVVLDLEPGALRELHWHPNADEWQYVIDGNISVTMFGSHGRVRTEQMEKGDVGYIPQGYGHSIENVGDRPCRVLIGFNTGNYQAIDLSQWIAGNPADVLATNFSKPTSLFEKFPKQDVFIAPGK

SEQ ID NO: 1299 - DNA, 1077 bp, synthetic construct
  misc_feature 1..1077: note = Variant of oxalate decarboxylase from Gemmata sp. SH-PL17
  source 1..1077: mol_type = other DNA
atgggtgaccctacctttatgaacaatgtaccagaccctctgctgtcgggcaaagatttgccgacgttcaagtttgagctggaaaagagcaagggcaaagtcattggggggagttcgggaaaagaagcaaccgttgtccagttacctatctccaaaggcattgctggtgtgagcatgtttcttgaaccgggtgcgatgcgcgaattgcactggcatgccacagcagcagagtgggggttcgtattatggggccacgtccgtacgacggtgatcgatccacaaggtctggccgaaaccaacgactttggaccgggcgacgtgtggtattttcctcgcggtcatgggcacatgctggaatgcctgggcgataaaccggcgcatttcattctgatcttcgataacggctacttctcagagtttggcaccttctctattactgactggatcggtcacacaccgaaagcgcttctcgccaagaactttaagctgcccgaaagcgcttttgatgggtttcccaaaaaagaggtctattttgcacgtggcgcggttccaccagccacccctgcagcgcctttacagggactgaagctgccaccactcacgcataaatacgaactcctcgaacaagaacctcataaagtttttaaaggtggtcgtgaatggcgcgtggatagcactcgttttcccatttccaagactgtaaccggcgttgttcttgatttggaacccggcgcgttacgcgagcttcactggcatcctaatgctgacgagtggcaatatgtgatcgatggcaacattagtgtgacgatgttcggttctcatggccgtgtacgcaccgaacagatggagaagggtgatgtcgggtatattccacaggggtatggccacagcatcgaaaatgttggagatcgtccttgtcgcgtcttgattggctttaacacaggtaactaccaagcgatcgacttatcacagtggattgcaggtaatcccgcggatgttcttgccacgaacttctccaaacccaccagcctctttgaaaagttcccaaaacaggacgtgtttattgctcctggcaag

SEQ ID NO: 1300 - protein, 359 aa, synthetic construct
  REGION 1..359: note = Variant of oxalate decarboxylase from Gemmata sp. SH-PL17
MGDPTFMNNVPDPLLSGKDLPTFKFELEKSKGKVIGGSSGKEATVVQLPISKGIAGVSMFLEPGAMRELHWHATAAEWGFVLWGHVRTTVIDPQGLAETNDFGPGDVWYFPRGHGHMLECLGDKPAHFILIFDNGYFSEFGTFSITDWIGHTPKALLAKNFKLPESAFDGFPKKEVYFARGAVPPATPAAPLQGLKLPPLTHKYELLEQEPHKVFKGGREWRVDSTRFPISKTVTGVVLDLEPGALRELHWHPNADEWQYVIDGNISVTMFGSHGRVRTEQMEKGDVGYIPQGYGHSIENVGDRPCRVLIGFNTGNYQAIDLSQWIAGNPADVLATNFSKPTSLFEKFPKQDVFIAPGK

SEQ ID NO: 1301 - DNA, 1077 bp, synthetic construct
  misc_feature 1..1077: note = Variant of oxalate decarboxylase from Gemmata sp. SH-PL17
  source 1..1077: mol_type = other DNA
atgggtgaccctacctttatgaacaatgtaccagaccctctgctgtcgggcaaagatttgccgacgttcaagtttattctggaaaagagcaagggcaaagtcattggggggagttcgggaaaagaagcaaccgttgtccagttacctatctccaaaggcattgctggtgtgagcatggtacttgaaccgggtgcgatgcgcgaattgcactggcatgccacagcagcagagtgggggttcgtattatggggccacgtccgtacgacggtgatcgatccacaaggtctggccgaaaccaacgactttggaccgggcgacgtgtggtattttcctcgcggtcatgggcacatgctggaatgcctgggcgataaaccggcgcatttcattctgatcttcgataacggctacttctcagagtttggcaccttctctattactgactggatcggtcacacaccgaaagcgcttctcgccaagaactttaagctgcccgaaagcgcttttgatgggtttcccaaaaaagaggtctattttgcacgtggcgcggttccaccagccacccctgcagcgcctttacagggactgaagctgccaccactcacgcataaatacgaactcctcgaacaagaacctcataaagtttttaaaggtggtcgtgaatggcgcgtggatagcactcgttttcccatttccaagactgtaaccggcgttgttcttgatttggaacccggcgcgttacgcgagcttcactggcatcctaatgctgacgagtggcaatatgtgatcgatggcaacattagtgtgacgatgttcggttctcatggccgtgtacgcaccgaacagatggagaagggtgatgtcgggtatattccacaggggtatggccacagcatcgaaaatgttggagatcgtccttgtcgcgtcttgattggctttaacacaggtaactaccaagcgatcgacttatcacagtggattgcaggtaatcccgcggatgttcttgccacgaacttctccaaacccaccagcctctttgaaaagttcccaaaacaggacgtgtttattgctcctggcaag

SEQ ID NO: 1302 - protein, 359 aa, synthetic construct
  REGION 1..359: note = Variant of oxalate decarboxylase from Gemmata sp. SH-PL17
MGDPTFMNNVPDPLLSGKDLPTFKFILEKSKGKVIGGSSGKEATVVQLPISKGIAGVSMVLEPGAMRELHWHATAAEWGFVLWGHVRTTVIDPQGLAETNDFGPGDVWYFPRGHGHMLECLGDKPAHFILIFDNGYFSEFGTFSITDWIGHTPKALLAKNFKLPESAFDGFPKKEVYFARGAVPPATPAAPLQGLKLPPLTHKYELLEQEPHKVFKGGREWRVDSTRFPISKTVTGVVLDLEPGALRELHWHPNADEWQYVIDGNISVTMFGSHGRVRTEQMEKGDVGYIPQGYGHSIENVGDRPCRVLIGFNTGNYQAIDLSQWIAGNPADVLATNFSKPTSLFEKFPKQDVFIAPGK

SEQ ID NO: 1303 - DNA, 1077 bp, synthetic construct
  misc_feature 1..1077: note = Variant of oxalate decarboxylase from Gemmata sp. SH-PL17
  source 1..1077: mol_type = other DNA
atgggtgaccctacctttatgaacaatgtaccagaccctctgctgtcggataaagatttgccgacgttcaagtttgagctggaaaagagcaagggcaaagtcattggggggagttcgggaaaagaagcaaccgttgtccagttacctatctccaaaggcattgctggtgtgagcatggtacttgaaccgggtgcgatgcgcgaattgcactggcatgccacagcagcagagtgggggttcgtattatggggccacgtccgtacgacggtgatcgatccacaaggtctggccgaaaccaacgactttggaccgggcgacgtgtggtattttcctcgcggtcatgggcacatgctggaatgcctgggcgataaaccggcgcatttcattctgatcttcgataacggctacttctcagagtttggcaccttctctattactgactggatcggtcacacaccgaaagcgcttctcgccaagaactttaagctgcccgaaagcgcttttgatgggtttcccaaaaaagaggtctattttgcacgtggcgcggttccaccagccacccctgcagcgcctttacagggactgaagctgccaccactcacgcataaatacgaactcctcgaacaagaacctcataaagtttttaaaggtggtcgtgaatggcgcgtggatagcactcgttttcccatttccaagactgtaaccggcgttgttcttgatttggaacccggcgcgttacgcgagcttcactggcatcctaatgctgacgagtggcaatatgtgatcgatggcaacattagtgtgacgatgttcggttctcatggccgtgtacgcaccgaacagatggagaagggtgatgtcgggtatattccacaggggtatggccacagcatcgaaaatgttggagatcgtccttgtcgcgtcttgattggctttaacacaggtaactaccaagcgatcgacttatcacagtggattgcaggtaatcccgcggatgttcttgccacgaacttctccaaacccaccagcctctttgaaaagttcccaaaacaggacgtgtttattgctcctggcaag

SEQ ID NO: 1304 - protein, 359 aa, synthetic construct
  REGION 1..359: note = Variant of oxalate decarboxylase from Gemmata sp. SH-PL17
MGDPTFMNNVPDPLLSDKDLPTFKFELEKSKGKVIGGSSGKEATVVQLPISKGIAGVSMVLEPGAMRELHWHATAAEWGFVLWGHVRTTVIDPQGLAETNDFGPGDVWYFPRGHGHMLECLGDKPAHFILIFDNGYFSEFGTFSITDWIGHTPKALLAKNFKLPESAFDGFPKKEVYFARGAVPPATPAAPLQGLKLPPLTHKYELLEQEPHKVFKGGREWRVDSTRFPISKTVTGVVLDLEPGALRELHWHPNADEWQYVIDGNISVTMFGSHGRVRTEQMEKGDVGYIPQGYGHSIENVGDRPCRVLIGFNTGNYQAIDLSQWIAGNPADVLATNFSKPTSLFEKFPKQDVFIAPGK

SEQ ID NO: 1305 - DNA, 1077 bp, synthetic construct
  misc_feature 1..1077: note = Variant of oxalate decarboxylase from Gemmata sp. SH-PL17
  source 1..1077: mol_type = other DNA
atgggtgaccctacctttatgaacaatgtaccagaccctctgctgtcgggcaaagatttgccgacgttcaagtttgagctggaaaagagcaagggcaaagtcattggggggagttcgggaaaagaagcaaccgttgtccagttacctatctccaaaggcattgctggtgtgagcatggtacttgaaccgggtgcgatgcgcgaattgcactggcatgccacagcagcagagtgggggttcgtattatggggccacgtccgtacgacggtgatcgatccacaaggtctggccgaaaccaacgactttggaccgggcgacgtgtggtattttcctcgcggtcatgggcacatgctggaatgcctgggcgataaaccggcgcatttcattctgatcttcgataacggctacttctcagagtttggcaccttctctattactgactggatcggtcacacaccgaaagcgcttctcgccaagaactttaagctgcccgaaagcgcttttgatgggtttcccaaaaaagaggtctattttgcacgtggcgcggttccaccagccacccctgcagcgcctttacagggactgaagctgccaccactcacgcataaatacgaactcctcgaacaagaacctcataaagtttttaaaggtggtcgtgaatggcgcgtggatagcactcgttttcccatttccaagactgtaaccggcgttgttcttgatttggaacccggcgcgttacgcgagcttcactggcatcctaatgctgacgagtggcaatatgtgatcgatggcaacattagtgtgacgatgttcggttctcatggccgtgtacgcaccgaacagatggagaagggtgatgtcgggtatattccacaggggtatggccacagcatcgaaaatgttggagatcgtccttgtcgcgtcttgattggctttaacacaggtaactacaaggcgatcgacttatcacagtggattgcaggtaatcccgcggatgttcttgccacgaacttctccaaacccaccagcctctttgaaaagttcccaaaacaggacgtgtttattgctcctggcaag

SEQ ID NO: 1306 - protein, 359 aa, synthetic construct
  REGION 1..359: note = Variant of oxalate decarboxylase from Gemmata sp. SH-PL17
MGDPTFMNNVPDPLLSGKDLPTFKFELEKSKGKVIGGSSGKEATVVQLPISKGIAGVSMVLEPGAMRELHWHATAAEWGFVLWGHVRTTVIDPQGLAETNDFGPGDVWYFPRGHGHMLECLGDKPAHFILIFDNGYFSEFGTFSITDWIGHTPKALLAKNFKLPESAFDGFPKKEVYFARGAVPPATPAAPLQGLKLPPLTHKYELLEQEPHKVFKGGREWRVDSTRFPISKTVTGVVLDLEPGALRELHWHPNADEWQYVIDGNISVTMFGSHGRVRTEQMEKGDVGYIPQGYGHSIENVGDRPCRVLIGFNTGNYKAIDLSQWIAGNPADVLATNFSKPTSLFEKFPKQDVFIAPGK

SEQ ID NO: 1307 - DNA, 1077 bp, synthetic construct
  misc_feature 1..1077: note = Variant of oxalate decarboxylase from Gemmata sp. SH-PL17
  source 1..1077: mol_type = other DNA
atgggtgaccctacctttatgaacaatgtaccagaccctctgctgtcgggcaaagatttgccgacgttcaagtttgagctggaaaagagcaagggcaaagtcattggggggagttcgggaaaagaagcaaccgttgtccagttacctatctccaaaggcattgctggtgtgagcatgaatcttgaaccgggtgcgatgcgcgaattgcactggcatgccacagcagcagagtgggggttcgtattatggggccacgtccgtacgacggtgatcgatccacaaggtctggccgaaaccaacgactttggaccgggcgacgtgtggtattttcctcgcggtcatgggcacatgctggaatgcctgggcgataaaccggcgcatttcattctgatcttcgataacggctacttctcagagtttggcaccttctctattactgactggatcggtcacacaccgaaagcgcttctcgccaagaactttaagctgcccgaaagcgcttttgatgggtttcccaaaaaagaggtctattttgcacgtggcgcggttccaccagccacccctgcagcgcctttacagggactgaagctgccaccactcacgcataaatacgaactcctcgaacaagaacctcataaagtttttaaaggtggtcgtgaatggcgcgtggatagcactcgttttcccatttccaagactgtaaccggcgttgttcttgatttggaacccggcgcgttacgcgagcttcactggcatcctaatgctgacgagtggcaatatgtgatcgatggcaacattagtgtgacgatgttcggttctcatggccgtgtacgcaccgaacagatggagaagggtgatgtcgggtatattccacaggggtatggccacagcatcgaaaatgttggagatcgtccttgtcgcgtcttgattggctttaacacaggtaactaccaagcgatcgacttatcacagtggattgcaggtaatcccgcggatgttcttgccacgaacttctccaaacccaccagcctctttgaaaagttcccaaaacaggacgtgtttattgctcctggcaag

SEQ ID NO: 1308 - protein, 359 aa, synthetic construct
  REGION 1..359: note = Variant of oxalate decarboxylase from Gemmata sp. SH-PL17
MGDPTFMNNVPDPLLSGKDLPTFKFELEKSKGKVIGGSSGKEATVVQLPISKGIAGVSMNLEPGAMRELHWHATAAEWGFVLWGHVRTTVIDPQGLAETNDFGPGDVWYFPRGHGHMLECLGDKPAHFILIFDNGYFSEFGTFSITDWIGHTPKALLAKNFKLPESAFDGFPKKEVYFARGAVPPATPAAPLQGLKLPPLTHKYELLEQEPHKVFKGGREWRVDSTRFPISKTVTGVVLDLEPGALRELHWHPNADEWQYVIDGNISVTMFGSHGRVRTEQMEKGDVGYIPQGYGHSIENVGDRPCRVLIGFNTGNYQAIDLSQWIAGNPADVLATNFSKPTSLFEKFPKQDVFIAPGK

SEQ ID NO: 1309 - DNA, 1077 bp, synthetic construct
  misc_feature 1..1077: note = Variant of oxalate decarboxylase from Gemmata sp. SH-PL17
  source 1..1077: mol_type = other DNA
atgggtgaccctacctttatgaacaatgtaccagaccctctgctgattggcaaagatttgccgacgttcaagtttgagctggaaaagagcaagggcaaagtcattggggggagttcgggaaaagaagcaaccgttgtccagttacctatctccaaaggcattgctggtgtgagcatggtacttgaaccgggtgcgatgcgcgaattgcactggcatgccacagcagcagagtgggggttcgtattatggggccacgtccgtacgacggtgatcgatccacaaggtctggccgaaaccaacgactttggaccgggcgacgtgtggtattttcctcgcggtcatgggcacatgctggaatgcctgggcgataaaccggcgcatttcattctgatcttcgataacggctacttctcagagtttggcaccttctctattactgactggatcggtcacacaccgaaagcgcttctcgccaagaactttaagctgcccgaaagcgcttttgatgggtttcccaaaaaagaggtctattttgcacgtggcgcggttccaccagccacccctgcagcgcctttacagggactgaagctgccaccactcacgcataaatacgaactcctcgaacaagaacctcataaagtttttaaaggtggtcgtgaatggcgcgtggatagcactcgttttcccatttccaagactgtaaccggcgttgttcttgatttggaacccggcgcgttacgcgagcttcactggcatcctaatgctgacgagtggcaatatgtgatcgatggcaacattagtgtgacgatgttcggttctcatggccgtgtacgcaccgaacagatggagaagggtgatgtcgggtatattccacaggggtatggccacagcatcgaaaatgttggagatcgtccttgtcgcgtcttgattggctttaacacaggtaactaccaagcgatcgacttatcacagtggattgcaggtaatcccgcggatgttcttgccacgaacttctccaaacccaccagcctctttgaaaagttcccaaaacaggacgtgtttattgctcctggcaag

SEQ ID NO: 1310 - protein, 359 aa, synthetic construct
  REGION 1..359: note = Variant of oxalate decarboxylase from Gemmata sp. SH-PL17
MGDPTFMNNVPDPLLIGKDLPTFKFELEKSKGKVIGGSSGKEATVVQLPISKGIAGVSMVLEPGAMRELHWHATAAEWGFVLWGHVRTTVIDPQGLAETNDFGPGDVWYFPRGHGHMLECLGDKPAHFILIFDNGYFSEFGTFSITDWIGHTPKALLAKNFKLPESAFDGFPKKEVYFARGAVPPATPAAPLQGLKLPPLTHKYELLEQEPHKVFKGGREWRVDSTRFPISKTVTGVVLDLEPGALRELHWHPNADEWQYVIDGNISVTMFGSHGRVRTEQMEKGDVGYIPQGYGHSIENVGDRPCRVLIGFNTGNYQAIDLSQWIAGNPADVLATNFSKPTSLFEKFPKQDVFIAPGK

SEQ ID NO: 1311 - DNA, 1077 bp, synthetic construct
  misc_feature 1..1077: note = Variant of oxalate decarboxylase from Gemmata sp. SH-PL17
  source 1..1077: mol_type = other DNA
atgggtgaccctacctttatgaacaatgtaccagaccctctgctgtcgggcaaagatttgccgacgttcaagtttgagctggaaaagagcaagggcaaagtcattggggggagttcgggaaaagaagcaaccgttgtccagttacctatctccaaaggcattgctggtgtgagcatggtacttgaaccgggtgcgatgcgcgaattgcactggcatgccacagcagcagagtgggggttcgtattatggggccacgtccgtacgacggtgatcgatccacaaggtctggccgaaaccaacgactttggaccgggcgacgtgtggtattttcctcgcggtcatgggcacatgctggaatgcctgggcgataaaccggcgcatttcattctgatcttcgataacggctacttctcagagtttggcaccttctctattactgactggatcggtcacacaccgaaagcgcttctcgccaagaactttaagctgcccgaaagcgcttttgatgggtttcccaaaaaagaggtctattttgcacgtggcgcggttccaccagccacccctgcagcgcctttacagggactgaagctgccaccactcacgcataaatacgaactcctcgaacaagaacctcataaagtttttaaaggtggtcgtgaatggcgcgtggatagcactcgttttcccatttccaagactgtaaccggcgttgttcttgatttggaacccggcgcgttacgcgagcttcactggcatcctaatgctgacgagtggcaatatgtgatcgatggcaacattagtgtgacgatgttcggttctcatggccgtgtacgcaccgaacagatggagaagggtgatgtcgggtatattccacaggggtatggccacagcatcgaaaatgttggagatcgtccttgtcgcgtcttgattggctttaacacaggtaactaccatgcgatcgacttatcacagtggattgcaggtaatcccgcggatgttcttgccacgaacttctccaaacccaccagcctctttgaaaagttcccaaaacaggacgtgtttattgctcctggcaag

SEQ ID NO: 1312 - protein, 359 aa, synthetic construct
  REGION 1..359: note = Variant of oxalate decarboxylase from Gemmata sp. SH-PL17
MGDPTFMNNVPDPLLSGKDLPTFKFELEKSKGKVIGGSSGKEATVVQLPISKGIAGVSMVLEPGAMRELHWHATAAEWGFVLWGHVRTTVIDPQGLAETNDFGPGDVWYFPRGHGHMLECLGDKPAHFILIFDNGYFSEFGTFSITDWIGHTPKALLAKNFKLPESAFDGFPKKEVYFARGAVPPATPAAPLQGLKLPPLTHKYELLEQEPHKVFKGGREWRVDSTRFPISKTVTGVVLDLEPGALRELHWHPNADEWQYVIDGNISVTMFGSHGRVRTEQMEKGDVGYIPQGYGHSIENVGDRPCRVLIGFNTGNYHAIDLSQWIAGNPADVLATNFSKPTSLFEKFPKQDVFIAPGK

SEQ ID NO: 1313 - DNA, 1077 bp, synthetic construct
  misc_feature 1..1077: note = Variant of oxalate decarboxylase from Gemmata sp. SH-PL17
  source 1..1077: mol_type = other DNA
atgggtgaccctacctttatgaacaatgtaccagaccctctgctgtcgggcaaagatttgccgacgttcaagtttgagctggaaaagagcaagggcaaagtcattggggcgagttcgggaaaagaagcaaccgttgtccagttacctatctccaaaggcattgctggtgtgagcatggtacttgaaccgggtgcgatgcgcgaattgcactggcatgccacagcagcagagtgggggttcgtattatggggccacgtccgtacgacggtgatcgatccacaaggtctggccgaaaccaacgactttggaccgggcgacgtgtggtattttcctcgcggtcatgggcacatgctggaatgcctgggcgataaaccggcgcatttcattctgatcttcgataacggctacttctcagagtttggcaccttctctattactgactggatcggtcacacaccgaaagcgcttctcgccaagaactttaagctgcccgaaagcgcttttgatgggtttcccaaaaaagaggtctattttgcacgtggcgcggttccaccagccacccctgcagcgcctttacagggactgaagctgccaccactcacgcataaatacgaactcctcgaacaagaacctcataaagtttttaaaggtggtcgtgaatggcgcgtggatagcactcgttttcccatttccaagactgtaaccggcgttgttcttgatttggaacccggcgcgttacgcgagcttcactggcatcctaatgctgacgagtggcaatatgtgatcgatggcaacattagtgtgacgatgttcggttctcatggccgtgtacgcaccgaacagatggagaagggtgatgtcgggtatattccacaggggtatggccacagcatcgaaaatgttggagatcgtccttgtcgcgtcttgattggctttaacacaggtaactaccaagcgatcgacttatcacagtggattgcaggtaatcccgcggatgttcttgccacgaacttctccaaacccaccagcctctttgaaaagttcccaaaacaggacgtgtttattgctcctggcaag

SEQ ID NO: 1314 - protein, 359 aa, synthetic construct
  REGION 1..359: note = Variant of oxalate decarboxylase from Gemmata sp. SH-PL17
MGDPTFMNNVPDPLLSGKDLPTFKFELEKSKGKVIGASSGKEATVVQLPISKGIAGVSMVLEPGAMRELHWHATAAEWGFVLWGHVRTTVIDPQGLAETNDFGPGDVWYFPRGHGHMLECLGDKPAHFILIFDNGYFSEFGTFSITDWIGHTPKALLAKNFKLPESAFDGFPKKEVYFARGAVPPATPAAPLQGLKLPPLTHKYELLEQEPHKVFKGGREWRVDSTRFPISKTVTGVVLDLEPGALRELHWHPNADEWQYVIDGNISVTMFGSHGRVRTEQMEKGDVGYIPQGYGHSIENVGDRPCRVLIGFNTGNYQAIDLSQWIAGNPADVLATNFSKPTSLFEKFPKQDVFIAPGK

SEQ ID NO: 1315 - DNA, 1077 bp, synthetic construct
  misc_feature 1..1077: note = Variant of oxalate decarboxylase from Gemmata sp. SH-PL17
  source 1..1077: mol_type = other DNA
atgggtgaccctacctttatgaacaatgtaccagaccctctgctgtcgggcaaagatttgccgacgttcaagtttgagctggaaaagagcaagggcaaagtcattggggggagttcgggaaaagaagcaaccgttgtccagttacctatctccaaaggcattgctggtgtgagcatggtacttgaaccgggtgcgatgcgcgaattgcactggcatgccacagcagcagagtgggggttcgtattatggggccacgtccgtacgacggtgatcgatccacaaggtctggccgaaaccaacgactttggaccgggcgacgtgtggtattttcctcgcggtcatgggcacatgctggaatgcctgggcgataaaccggcgcatttcattctgatcttcgataacggctacttctcagagtttggcaccttctctattactgactggatcggtcacacaccgaaagcgcttctcgccaagaactttaagctgcccgaaagcgcttttgatgggtttcccaaaaaagaggtctattttgcacgtggcgcggttccaccagccacccctgcagcgcctttacagggagtgaagctgccaccactcacgcataaatacgaactcctcgaacaagaacctcataaagtttttaaaggtggtcgtgaatggcgcgtggatagcactcgttttcccatttccaagactgtaaccggcgttgttcttgatttggaacccggcgcgttacgcgagcttcactggcatcctaatgctgacgagtggcaatatgtgatcgatggcaacattagtgtgacgatgttcggttctcatggccgtgtacgcaccgaacagatggagaagggtgatgtcgggtatattccacaggggtatggccacagcatcgaaaatgttggagatcgtccttgtcgcgtcttgattggctttaacacaggtaactaccaagcgatcgacttatcacagtggattgcaggtaatcccgcggatgttcttgccacgaacttctccaaacccaccagcctctttgaaaagttcccaaaacaggacgtgtttattgctcctggcaag

SEQ ID NO: 1316 - protein, 359 aa, synthetic construct
  REGION 1..359: note = Variant of oxalate decarboxylase from Gemmata sp. SH-PL17
MGDPTFMNNVPDPLLSGKDLPTFKFELEKSKGKVIGGSSGKEATVVQLPISKGIAGVSMVLEPGAMRELHWHATAAEWGFVLWGHVRTTVIDPQGLAETNDFGPGDVWYFPRGHGHMLECLGDKPAHFILIFDNGYFSEFGTFSITDWIGHTPKALLAKNFKLPESAFDGFPKKEVYFARGAVPPATPAAPLQGVKLPPLTHKYELLEQEPHKVFKGGREWRVDSTRFPISKTVTGVVLDLEPGALRELHWHPNADEWQYVIDGNISVTMFGSHGRVRTEQMEKGDVGYIPQGYGHSIENVGDRPCRVLIGFNTGNYQAIDLSQWIAGNPADVLATNFSKPTSLFEKFPKQDVFIAPGK

SEQ ID NO: 1317 - DNA, 1077 bp, synthetic construct
  misc_feature 1..1077: note = Variant of oxalate decarboxylase from Gemmata sp. SH-PL17
  source 1..1077: mol_type = other DNA
atgggtgaccctacctttatgaacaatgtaccagaccctctgctgtcgggcaaagatttgccgacgttcaagtttgagctggaaaagagcaagggcaaagtcattggggggagttcgggaaaagaagcaaccgttgtccagttacctatctccaaaggcattgctggtgtgagcatggtacttgaaccgggtgcgatgcgcgaattgcactggcatgccacagcagcagagtgggggttcgtattatggggccacgtccgtacgacggtgatcgatccacaaggtctggccgaaaccaacgactttggaccgggcgacgtgtggtattttcctcgcggtcatgggcacatgctggaatgcctgggcgataaaccggcgcatttcattctgatcttcgataacggctacttctcagagtttggcaccttctctattactgactggatcggtcacacaccgaaagcgcttctcgccaagaactttaagctgcccgaaagcgcttttgatgggtttcccaaaaaagaggtctattttgcacgtggcgcggttccaccagccacccctgcagcgcctttacagggactgaagctgccaccactcacgcataaatacgaactcctcgaacaatatcctcataaagtttttaaaggtggtcgtgaatggcgcgtggatagcactcgttttcccatttccaagactgtaaccggcgttgttcttgatttggaacccggcgcgttacgcgagcttcactggcatcctaatgctgacgagtggcaatatgtgatcgatggcaacattagtgtgacgatgttcggttctcatggccgtgtacgcaccgaacagatggagaagggtgatgtcgggtatattccacaggggtatggccacagcatcgaaaatgttggagatcgtccttgtcgcgtcttgattggctttaacacaggtaactaccaagcgatcgacttatcacagtggattgcaggtaatcccgcggatgttcttgccacgaacttctccaaacccaccagcctctttgaaaagttcccaaaacaggacgtgtttattgctcctggcaag

SEQ ID NO: 1318 - protein, 359 aa, synthetic construct
  REGION 1..359: note = Variant of oxalate decarboxylase from Gemmata sp. SH-PL17
MGDPTFMNNVPDPLLSGKDLPTFKFELEKSKGKVIGGSSGKEATVVQLPISKGIAGVSMVLEPGAMRELHWHATAAEWGFVLWGHVRTTVIDPQGLAETNDFGPGDVWYFPRGHGHMLECLGDKPAHFILIFDNGYFSEFGTFSITDWIGHTPKALLAKNFKLPESAFDGFPKKEVYFARGAVPPATPAAPLQGLKLPPLTHKYELLEQYPHKVFKGGREWRVDSTRFPISKTVTGVVLDLEPGALRELHWHPNADEWQYVIDGNISVTMFGSHGRVRTEQMEKGDVGYIPQGYGHSIENVGDRPCRVLIGFNTGNYQAIDLSQWIAGNPADVLATNFSKPTSLFEKFPKQDVFIAPGK

SEQ ID NO: 1319 - DNA, 1077 bp, synthetic construct
  misc_feature 1..1077: note = Variant of oxalate decarboxylase from Gemmata sp. SH-PL17
  source 1..1077: mol_type = other DNA
atgggtgaccctacctttatgaacaatgtaccagaccctctgctgtcgggcaaagatttgccgacgttcaagtttgagctggaaaagagcaagggcaaagtcattggggggagttcgggaaaagaagcaaccgttgtccagttacctatctccaaaggcattgctggtgtgagcatggtacttgaaccgggtgcgatgcgcgaattgcactggcatgccacagcagcagagtgggggttcgtattatggggccacgtccgtacgacggtgatcgatccacaaggtctggccgaaaccaacgactttggaccgggcgacgtgtggtattttcctcgcggtcatgggcacatgctggaatgcctgggcgataaaccggcgcatttcattctgatcttcgataacggctacttctcagagtttggcaccttctctattactgactggatcggtcacacaccgaaagcgcttctcgccaagaactttaagctgcccgaaagcgcttttgatgggtttcccaaaaaagaggtctattttgcacgtggcgcggttccaccagccacccctgcagcgcctttacagggagagaagctgccaccactcacgcataaatacgaactcctcgaacaagaacctcataaagtttttaaaggtggtcgtgaatggcgcgtggatagcactcgttttcccatttccaagactgtaaccggcgttgttcttgatttggaacccggcgcgttacgcgagcttcactggcatcctaatgctgacgagtggcaatatgtgatcgatggcaacattagtgtgacgatgttcggttctcatggccgtgtacgcaccgaacagatggagaagggtgatgtcgggtatattccacaggggtatggccacagcatcgaaaatgttggagatcgtccttgtcgcgtcttgattggctttaacacaggtaactaccaagcgatcgacttatcacagtggattgcaggtaatcccgcggatgttcttgccacgaacttctccaaacccaccagcctctttgaaaagttcccaaaacaggacgtgtttattgctcctggcaag

SEQ ID NO: 1320 - protein, 359 aa, synthetic construct
  REGION 1..359: note = Variant of oxalate decarboxylase from Gemmata sp. SH-PL17
MGDPTFMNNVPDPLLSGKDLPTFKFELEKSKGKVIGGSSGKEATVVQLPISKGIAGVSMVLEPGAMRELHWHATAAEWGFVLWGHVRTTVIDPQGLAETNDFGPGDVWYFPRGHGHMLECLGDKPAHFILIFDNGYFSEFGTFSITDWIGHTPKALLAKNFKLPESAFDGFPKKEVYFARGAVPPATPAAPLQGEKLPPLTHKYELLEQEPHKVFKGGREWRVDSTRFPISKTVTGVVLDLEPGALRELHWHPNADEWQYVIDGNISVTMFGSHGRVRTEQMEKGDVGYIPQGYGHSIENVGDRPCRVLIGFNTGNYQAIDLSQWIAGNPADVLATNFSKPTSLFEKFPKQDVFIAPGK

SEQ ID NO: 1321 - DNA, 1077 bp, synthetic construct
  misc_feature 1..1077: note = Variant of oxalate decarboxylase from Gemmata sp. SH-PL17
  source 1..1077: mol_type = other DNA
atgggtgaccctacctttatgaacaatgtaccagaccctctgctgtcgggcaaagatttgccgacgttcaagtttcatctggaaaagagcaagggcaaagtcattggggggagttcgggaaaagaagcaaccgttgtccagttacctatctccaaaggcattgctggtgtgagcatggtacttgaaccgggtgcgatgcgcgaattgcactggcatgccacagcagcagagtgggggttcgtattatggggccacgtccgtacgacggtgatcgatccacaaggtctggccgaaaccaacgactttggaccgggcgacgtgtggtattttcctcgcggtcatgggcacatgctggaatgcctgggcgataaaccggcgcatttcattctgatcttcgataacggctacttctcagagtttggcaccttctctattactgactggatcggtcacacaccgaaagcgcttctcgccaagaactttaagctgcccgaaagcgcttttgatgggtttcccaaaaaagaggtctattttgcacgtggcgcggttccaccagccacccctgcagcgcctttacagggactgaagctgccaccactcacgcataaatacgaactcctcgaacaagaacctcataaagtttttaaaggtggtcgtgaatggcgcgtggatagcactcgttttcccatttccaagactgtaaccggcgttgttcttgatttggaacccggcgcgttacgcgagcttcactggcatcctaatgctgacgagtggcaatatgtgatcgatggcaacattagtgtgacgatgttcggttctcatggccgtgtacgcaccgaacagatggagaagggtgatgtcgggtatattccacaggggtatggccacagcatcgaaaatgttggagatcgtccttgtcgcgtcttgattggctttaacacaggtaactaccaagcgatcgacttatcacagtggattgcaggtaatcccgcggatgttcttgccacgaacttctccaaacccaccagcctctttgaaaagttcccaaaacaggacgtgtttattgctcctggcaag

SEQ ID NO: 1322 - protein, 359 aa, synthetic construct
  REGION 1..359: note = Variant of oxalate decarboxylase from Gemmata sp. SH-PL17
MGDPTFMNNVPDPLLSGKDLPTFKFHLEKSKGKVIGGSSGKEATVVQLPISKGIAGVSMVLEPGAMRELHWHATAAEWGFVLWGHVRTTVIDPQGLAETNDFGPGDVWYFPRGHGHMLECLGDKPAHFILIFDNGYFSEFGTFSITDWIGHTPKALLAKNFKLPESAFDGFPKKEVYFARGAVPPATPAAPLQGLKLPPLTHKYELLEQEPHKVFKGGREWRVDSTRFPISKTVTGVVLDLEPGALRELHWHPNADEWQYVIDGNISVTMFGSHGRVRTEQMEKGDVGYIPQGYGHSIENVGDRPCRVLIGFNTGNYQAIDLSQWIAGNPADVLATNFSKPTSLFEKFPKQDVFIAPGK

SEQ ID NO: 1323 - DNA, 1077 bp, synthetic construct
  misc_feature 1..1077: note = Variant of oxalate decarboxylase from Gemmata sp. SH-PL17
  source 1..1077: mol_type = other DNA
atgggtgaccctacctttatgaacaatgtaccagacgatctgctgtcgggcaaagatttgccgacgttcaagtttgagctggaaaagagcaagggcaaagtcattggggggagttcgggaaaagaagcaaccgttgtccagttacctatctccaaaggcattgctggtgtgagcatggtacttgaaccgggtgcgatgcgcgaattgcactggcatgccacagcagcagagtgggggttcgtattatggggccacgtccgtacgacggtgatcgatccacaaggtctggccgaaaccaacgactttggaccgggcgacgtgtggtattttcctcgcggtcatgggcacatgctggaatgcctgggcgataaaccggcgcatttcattctgatcttcgataacggctacttctcagagtttggcaccttctctattactgactggatcggtcacacaccgaaagcgcttctcgccaagaactttaagctgcccgaaagcgcttttgatgggtttcccaaaaaagaggtctattttgcacgtggcgcggttccaccagccacccctgcagcgcctttacagggactgaagctgccaccactcacgcataaatacgaactcctcgaacaagaacctcataaagtttttaaaggtggtcgtgaatggcgcgtggatagcactcgttttcccatttccaagactgtaaccggcgttgttcttgatttggaacccggcgcgttacgcgagcttcactggcatcctaatgctgacgagtggcaatatgtgatcgatggcaacattagtgtgacgatgttcggttctcatggccgtgtacgcaccgaacagatggagaagggtgatgtcgggtatattccacaggggtatggccacagcatcgaaaatgttggagatcgtccttgtcgcgtcttgattggctttaacacaggtaactaccaagcgatcgacttatcacagtggattgcaggtaatcccgcggatgttcttgccacgaacttctccaaacccaccagcctctttgaaaagttcccaaaacaggacgtgtttattgctcctggcaag

SEQ ID NO: 1324 - protein, 359 aa, synthetic construct
  REGION 1..359: note = Variant of oxalate decarboxylase from Gemmata sp. SH-PL17
MGDPTFMNNVPDDLLSGKDLPTFKFELEKSKGKVIGGSSGKEATVVQLPISKGIAGVSMVLEPGAMRELHWHATAAEWGFVLWGHVRTTVIDPQGLAETNDFGPGDVWYFPRGHGHMLECLGDKPAHFILIFDNGYFSEFGTFSITDWIGHTPKALLAKNFKLPESAFDGFPKKEVYFARGAVPPATPAAPLQGLKLPPLTHKYELLEQEPHKVFKGGREWRVDSTRFPISKTVTGVVLDLEPGALRELHWHPNADEWQYVIDGNISVTMFGSHGRVRTEQMEKGDVGYIPQGYGHSIENVGDRPCRVLIGFNTGNYQAIDLSQWIAGNPADVLATNFSKPTSLFEKFPKQDVFIAPGK

SEQ ID NO: 1325 - DNA, 1077 bp, synthetic construct
  misc_feature 1..1077: note = Variant of oxalate decarboxylase from Gemmata sp. SH-PL17
  source 1..1077: mol_type = other DNA
atgggtgaccctacctttatgaacaatgtaccagaccctctgctgtcgggcaaagatttgccgacgttcaagtttgagctggaaaagagcccgggcaaagtcattggggggagttcgggaaaagaagcaaccgttgtccagttacctatctccaaaggcattgctggtgtgagcatggtacttgaaccgggtgcgatgcgcgaattgcactggcatgccacagcagcagagtgggggttcgtattatggggccacgtccgtacgacggtgatcgatccacaaggtctggccgaaaccaacgactttggaccgggcgacgtgtggtattttcctcgcggtcatgggcacatgctggaatgcctgggcgataaaccggcgcatttcattctgatcttcgataacggctacttctcagagtttggcaccttctctattactgactggatcggtcacacaccgaaagcgcttctcgccaagaactttaagctgcccgaaagcgcttttgatgggtttcccaaaaaagaggtctattttgcacgtggcgcggttccaccagccacccctgcagcgcctttacagggactgaagctgccaccactcacgcataaatacgaactcctcgaacaagaacctcataaagtttttaaaggtggtcgtgaatggcgcgtggatagcactcgttttcccatttccaagactgtaaccggcgttgttcttgatttggaacccggcgcgttacgcgagcttcactggcatcctaatgctgacgagtggcaatatgtgatcgatggcaacattagtgtgacgatgttcggttctcatggccgtgtacgcaccgaacagatggagaagggtgatgtcgggtatattccacaggggtatggccacagcatcgaaaatgttggagatcgtccttgtcgcgtcttgattggctttaacacaggtaactaccaagcgatcgacttatcacagtggattgcaggtaatcccgcggatgttcttgccacgaacttctccaaacccaccagcctctttgaaaagttcccaaaacaggacgtgtttattgctcctggcaag

SEQ ID NO: 1326 - protein, 359 aa, synthetic construct
  REGION 1..359: note = Variant of oxalate decarboxylase from Gemmata sp. SH-PL17
MGDPTFMNNVPDPLLSGKDLPTFKFELEKSPGKVIGGSSGKEATVVQLPISKGIAGVSMVLEPGAMRELHWHATAAEWGFVLWGHVRTTVIDPQGLAETNDFGPGDVWYFPRGHGHMLECLGDKPAHFILIFDNGYFSEFGTFSITDWIGHTPKALLAKNFKLPESAFDGFPKKEVYFARGAVPPATPAAPLQGLKLPPLTHKYELLEQEPHKVFKGGREWRVDSTRFPISKTVTGVVLDLEPGALRELHWHPNADEWQYVIDGNISVTMFGSHGRVRTEQMEKGDVGYIPQGYGHSIENVGDRPCRVLIGFNTGNYQAIDLSQWIAGNPADVLATNFSKPTSLFEKFPKQDVFIAPGK

SEQ ID NO: 1327 - DNA, 1077 bp, synthetic construct
  misc_feature 1..1077: note = Variant of oxalate decarboxylase from Gemmata sp. SH-PL17
  source 1..1077: mol_type = other DNA
atgggtgaccctacctttatgaacaatgtaccagaccctctgctgtcgggcaaagatttgccgacgttcaagtttgagctggaaaagagcaagggcaaagtcattggggggagttcgggaaaagaagcaaccgttgtccagttacctatctccaaaggcattgctggtgtgagcatggtacttgaaccgggtgcgatgcgcgaattgcactggcatgccacagcagcagagtgggggttcgtattatggggccacgtccgtacgacggtgatcgatccacaaggtctggccgaaaccaacgactttggaccgggcgacgtgtggtattttcctcgcggtcatgggcacatgctggaatgcctgggcgataaaccggcgcatttcattctgatcttcgataacggctacttctcagagtttggcaccttctctattactgactggatcggtcacacaccgaaagcgcttctcgccaagaactttaagctgcccgaaagcgcttttgatgggtttcccaaaaaagaggtctattttgcacgtggcgcggttccaccagccacccctgcagcgcctttacagggactgaagctgccaccactcacgcataaatacgaactcctcgaacaatggcctcataaagtttttaaaggtggtcgtgaatggcgcgtggatagcactcgttttcccatttccaagactgtaaccggcgttgttcttgatttggaacccggcgcgttacgcgagcttcactggcatcctaatgctgacgagtggcaatatgtgatcgatggcaacattagtgtgacgatgttcggttctcatggccgtgtacgcaccgaacagatggagaagggtgatgtcgggtatattccacaggggtatggccacagcatcgaaaatgttggagatcgtccttgtcgcgtcttgattggctttaacacaggtaactaccaagcgatcgacttatcacagtggattgcaggtaatcccgcggatgttcttgccacgaacttctccaaacccaccagcctctttgaaaagttcccaaaacaggacgtgtttattgctcctggcaag

SEQ ID NO: 1328 - protein, 359 aa, synthetic construct
  REGION 1..359: note = Variant of oxalate decarboxylase from Gemmata sp. SH-PL17
MGDPTFMNNVPDPLLSGKDLPTFKFELEKSKGKVIGGSSGKEATVVQLPISKGIAGVSMVLEPGAMRELHWHATAAEWGFVLWGHVRTTVIDPQGLAETNDFGPGDVWYFPRGHGHMLECLGDKPAHFILIFDNGYFSEFGTFSITDWIGHTPKALLAKNFKLPESAFDGFPKKEVYFARGAVPPATPAAPLQGLKLPPLTHKYELLEQWPHKVFKGGREWRVDSTRFPISKTVTGVVLDLEPGALRELHWHPNADEWQYVIDGNISVTMFGSHGRVRTEQMEKGDVGYIPQGYGHSIENVGDRPCRVLIGFNTGNYQAIDLSQWIAGNPADVLATNFSKPTSLFEKFPKQDVFIAPGK

SEQ ID NO: 1329 - DNA, 1077 bp, synthetic construct
  misc_feature 1..1077: note = Variant of oxalate decarboxylase from Gemmata sp. SH-PL17
  source 1..1077: mol_type = other DNA
atgggtgaccctacctttatgaacaatgtaccagaccctctgctgtcgggcaaagatttgccgacgttcaagtttgagctggaaaagagcaagggcaaagtcattggggggagttcgggaaaagaagcaaccgttgtccagttacctatctccaaaggcattgctggtgtgagcatggtacttgaaccgggtgcgatgcgcgaattgcactggcatgccacagcagcagagtgggggttcgtattatggggccacgtccgtacgacggtgatcgatccacaaggtctggccgaaaccaacgactttggaccgggcgacgtgtggtattttcctcgcggtcatgggcacatgctggaatgcctgggcgataaaccggcgcatttcattctgatcttcgataacggctacttctcagagtttggcaccttctctattactgactggatcggtcacacaccgaaagcgcttctcgccaagaactttaagctgcccgaaagcgcttttgatgggtttcccaaaaaagaggtctattttgcacgtggcgcggttccaccagccacccctgcagcgcctttacagggactgaagctgccaccactcacgcataaatacgaactcctcgaacaagaacctcataaagtttttaaaggtggtcgtgaatggcgcgtggatagcactcgttttcccatttccaagactgtaaccggcgttgttcttgatttggaacccggcgcgttacgcgagcttcactggcatcctaatgctgacgagtggcaatatgtgatcgatggcaacattagtgtgacgatgttcggttctcatggccgtgtacgcaccgaacagatggagaagggtgatgtcgggtatattccacaggggtatggccacagcatcgaaaatgttggagatcgtccttgtcgcgtcttgattggctttaacacaggtaactacccggcgatcgacttatcacagtggattgcaggtaatcccgcggatgttcttgccacgaacttctccaaacccaccagcctctttgaaaagttcccaaaacaggacgtgtttattgctcctggcaag

SEQ ID NO: 1330 - protein, 359 aa, synthetic construct
  REGION 1..359: note = Variant of oxalate decarboxylase from Gemmata sp. SH-PL17
MGDPTFMNNVPDPLLSGKDLPTFKFELEKSKGKVIGGSSGKEATVVQLPISKGIAGVSMVLEPGAMRELHWHATAAEWGFVLWGHVRTTVIDPQGLAETNDFGPGDVWYFPRGHGHMLECLGDKPAHFILIFDNGYFSEFGTFSITDWIGHTPKALLAKNFKLPESAFDGFPKKEVYFARGAVPPATPAAPLQGLKLPPLTHKYELLEQEPHKVFKGGREWRVDSTRFPISKTVTGVVLDLEPGALRELHWHPNADEWQYVIDGNISVTMFGSHGRVRTEQMEKGDVGYIPQGYGHSIENVGDRPCRVLIGFNTGNYPAIDLSQWIAGNPADVLATNFSKPTSLFEKFPKQDVFIAPGK

SEQ ID NO: 1331 - DNA, 1077 bp, synthetic construct
  misc_feature 1..1077: note = Variant of oxalate decarboxylase from Gemmata sp. SH-PL17
  source 1..1077: mol_type = other DNA
atgggtgaccctacctttatgaacaatgtaccagaccctctgctgtcgggcaaagatttgccgacgttcaagtttgagctggaaaagagcaagggcaaagtcattggggggagttcgggaaaagaagcaaccgttgtccagttacctatctccaaaggcattgctggtgtgagcatggtacttgaaccgggtgcgatgcgcgaattgcactggcatgccacagcagcagagtgggggttcgtattatgtggccacgtccgtacgacggtgatcgatccacaaggtctggccgaaaccaacgactttggaccgggcgacgtgtggtattttcctcgcggtcatgggcacatgctggaatgcctgggcgataaaccggcgcatttcattctgatcttcgataacggctacttctcagagtttggcaccttctctattactgactggatcggtcacacaccgaaagcgcttctcgccaagaactttaagctgcccgaaagcgcttttgatgggtttcccaaaaaagaggtctattttgcacgtggcgcggttccaccagccacccctgcagcgcctttacagggactgaagctgccaccactcacgcataaatacgaactcctcgaacaagaacctcataaagtttttaaaggtggtcgtgaatggcgcgtggatagcactcgttttcccatttccaagactgtaaccggcgttgttcttgatttggaacccggcgcgttacgcgagcttcactggcatcctaatgctgacgagtggcaatatgtgatcgatggcaacattagtgtgacgatgttcggttctcatggccgtgtacgcaccgaacagatggagaagggtgatgtcgggtatattccacaggggtatggccacagcatcgaaaatgttggagatcgtccttgtcgcgtcttgattggctttaacacaggtaactaccaagcgatcgacttatcacagtggattgcaggtaatcccgcggatgttcttgccacgaacttctccaaacccaccagcctctttgaaaagttcccaaaacaggacgtgtttattgctcctggcaag

SEQ ID NO: 1332 - protein, 359 aa, synthetic construct
  REGION 1..359: note = Variant of oxalate decarboxylase from Gemmata sp. SH-PL17
MGDPTFMNNVPDPLLSGKDLPTFKFELEKSKGKVIGGSSGKEATVVQLPISKGIAGVSMVLEPGAMRELHWHATAAEWGFVLCGHVRTTVIDPQGLAETNDFGPGDVWYFPRGHGHMLECLGDKPAHFILIFDNGYFSEFGTFSITDWIGHTPKALLAKNFKLPESAFDGFPKKEVYFARGAVPPATPAAPLQGLKLPPLTHKYELLEQEPHKVFKGGREWRVDSTRFPISKTVTGVVLDLEPGALRELHWHPNADEWQYVIDGNISVTMFGSHGRVRTEQMEKGDVGYIPQGYGHSIENVGDRPCRVLIGFNTGNYQAIDLSQWIAGNPADVLATNFSKPTSLFEKFPKQDVFIAPGK

SEQ ID NO: 1333 - DNA, 1077 bp, synthetic construct
  misc_feature 1..1077: note = Variant of oxalate decarboxylase from Gemmata sp. SH-PL17
  source 1..1077: mol_type = other DNA
atgggtgaccctacctttatgaacaatgtaccagaccctctgctgtcgggcaaagatttgccgacgttcaagtttgagctggaaaagagcaagggcaaagtcattggggggagttcgggaaaagaagcaaccgttgtccagttacctatctccaaaggcattgctggtgtgagcatggtacttgaaccgggtgcgatgcgcgaattgcactggcatgccacagcagcagagtgggggttcgtattatggggccacgtccgtacgacggtgatcgatccacaaggtctggccgaaaccaacgactttggaccgggcgacgtgtggtattttcctcgcggtcatgggcacatgctggaatgcctgggcgataaaccggcgcatttcattctgatcttcgataacggctacttctcagagtttggcaccttctctattactgactggatcggtcacacaccgaaagcgcttctcgccaagaactttaagctgcccgaaagcgcttttgatgggtttcccaaacctgaggtctattttgcacgtggcgcggttccaccagccacccctgcagcgcctttacagggactgaagctgccaccactcacgcataaatacgaactcctcgaacaagaacctcataaagtttttaaaggtggtcgtgaatggcgcgtggatagcactcgttttcccatttccaagactgtaaccggcgttgttcttgatttggaacccggcgcgttacgcgagcttcactggcatcctaatgctgacgagtggcaatatgtgatcgatggcaacattagtgtgacgatgttcggttctcatggccgtgtacgcaccgaacagatggagaagggtgatgtcgggtatattccacaggggtatggccacagcatcgaaaatgttggagatcgtccttgtcgcgtcttgattggctttaacacaggtaactaccaagcgatcgacttatcacagtggattgcaggtaatcccgcggatgttcttgccacgaacttctccaaacccaccagcctctttgaaaagttcccaaaacaggacgtgtttattgctcctggcaag

SEQ ID NO: 1334 - protein, 359 aa, synthetic construct
  REGION 1..359: note = Variant of oxalate decarboxylase from Gemmata sp. SH-PL17
MGDPTFMNNVPDPLLSGKDLPTFKFELEKSKGKVIGGSSGKEATVVQLPISKGIAGVSMVLEPGAMRELHWHATAAEWGFVLWGHVRTTVIDPQGLAETNDFGPGDVWYFPRGHGHMLECLGDKPAHFILIFDNGYFSEFGTFSITDWIGHTPKALLAKNFKLPESAFDGFPKPEVYFARGAVPPATPAAPLQGLKLPPLTHKYELLEQEPHKVFKGGREWRVDSTRFPISKTVTGVVLDLEPGALRELHWHPNADEWQYVIDGNISVTMFGSHGRVRTEQMEKGDVGYIPQGYGHSIENVGDRPCRVLIGFNTGNYQAIDLSQWIAGNPADVLATNFSKPTSLFEKFPKQDVFIAPGK

SEQ ID NO: 1335 - DNA, 1077 bp, synthetic construct
  misc_feature 1..1077: note = Variant of oxalate decarboxylase from Gemmata sp. SH-PL17
  source 1..1077: mol_type = other DNA
atgggtgaccctacctttatgaacaatgtaccagaccctctgctgtcgggcaaagatttgccgacgttcaagtttgagctggaaaagagcaagggcaaagtcattggggggagttcgggaaaagaagcaaccgttgtccagttacctatctccaaaggcattgctggtgtgagcatggtacttgaaccgggtgcgatgcgcgaattgcactggcatgccacagcagcagagtgggggttcgtattatggggccacgtccgtacgacggtgatcgatccacaaggtctggccgaaaccaacgactttggaccgggcgacgtgtggtattttcctcgcggtcatgggcacatgctggaatgcctgggcgataaaccggcgcatttcattctgatcttcgataacggctacttctcagagtttggcaccttctctattactgactggatcggtcacacaccgaaagcgcttctcgccaagaactttaagctgcccgaaagcgcttttgatgggtttcccaaaaaagaggtctattttgcacgtggcgcggttccaccagccacccctgcagcgcctttacagggactgaagctgccaccactcacgcataaatacgaactcctcgaacaaacgcctcataaagtttttaaaggtggtcgtgaatggcgcgtggatagcactcgttttcccatttccaagactgtaaccggcgttgttcttgatttggaacccggcgcgttacgcgagcttcactggcatcctaatgctgacgagtggcaatatgtgatcgatggcaacattagtgtgacgatgttcggttctcatggccgtgtacgcaccgaacagatggagaagggtgatgtcgggtatattccacaggggtatggccacagcatcgaaaatgttggagatcgtccttgtcgcgtcttgattggctttaacacaggtaactaccaagcgatcgacttatcacagtggattgcaggtaatcccgcggatgttcttgccacgaacttctccaaacccaccagcctctttgaaaagttcccaaaacaggacgtgtttattgctcctggcaag

SEQ ID NO: 1336 - protein, 359 aa, synthetic construct
  REGION 1..359: note = Variant of oxalate decarboxylase from Gemmata sp. SH-PL17
MGDPTFMNNVPDPLLSGKDLPTFKFELEKSKGKVIGGSSGKEATVVQLPISKGIAGVSMVLEPGAMRELHWHATAAEWGFVLWGHVRTTVIDPQGLAETNDFGPGDVWYFPRGHGHMLECLGDKPAHFILIFDNGYFSEFGTFSITDWIGHTPKALLAKNFKLPESAFDGFPKKEVYFARGAVPPATPAAPLQGLKLPPLTHKYELLEQTPHKVFKGGREWRVDSTRFPISKTVTGVVLDLEPGALRELHWHPNADEWQYVIDGNISVTMFGSHGRVRTEQMEKGDVGYIPQGYGHSIENVGDRPCRVLIGFNTGNYQAIDLSQWIAGNPADVLATNFSKPTSLFEKFPKQDVFIAPGK

SEQ ID NO: 1337 - DNA, 1077 bp, synthetic construct
  misc_feature 1..1077: note = Variant of oxalate decarboxylase from Gemmata sp. SH-PL17
  source 1..1077: mol_type = other DNA
atgggtgaccctacctttatgaacaatgtaccagaccctctgctgtcgacgaaagatttgccgacgttcaagtttgagctggaaaagagcaagggcaaagtcattggggggagttcgggaaaagaagcaaccgttgtccagttacctatctccaaaggcattgctggtgtgagcatggtacttgaaccgggtgcgatgcgcgaattgcactggcatgccacagcagcagagtgggggttcgtattatggggccacgtccgtacgacggtgatcgatccacaaggtctggccgaaaccaacgactttggaccgggcgacgtgtggtattttcctcgcggtcatgggcacatgctggaatgcctgggcgataaaccggcgcatttcattctgatcttcgataacggctacttctcagagtttggcaccttctctattactgactggatcggtcacacaccgaaagcgcttctcgccaagaactttaagctgcccgaaagcgcttttgatgggtttcccaaaaaagaggtctattttgcacgtggcgcggttccaccagccacccctgcagcgcctttacagggactgaagctgccaccactcacgcataaatacgaactcctcgaacaagaacctcataaagtttttaaaggtggtcgtgaatggcgcgtggatagcactcgttttcccatttccaagactgtaaccggcgttgttcttgatttggaacccggcgcgttacgcgagcttcactggcatcctaatgctgacgagtggcaatatgtgatcgatggcaacattagtgtgacgatgttcggttctcatggccgtgtacgcaccgaacagatggagaagggtgatgtcgggtatattccacaggggtatggccacagcatcgaaaatgttggagatcgtccttgtcgcgtcttgattggctttaacacaggtaactaccaagcgatcgacttatcacagtggattgcaggtaatcccgcggatgttcttgccacgaacttctccaaacccaccagcctctttgaaaagttcccaaaacaggacgtgtttattgctcctggcaag

SEQ ID NO: 1338 - protein, 359 aa, synthetic construct
  REGION 1..359: note = Variant of oxalate decarboxylase from Gemmata sp. SH-PL17
MGDPTFMNNVPDPLLSTKDLPTFKFELEKSKGKVIGGSSGKEATVVQLPISKGIAGVSMVLEPGAMRELHWHATAAEWGFVLWGHVRTTVIDPQGLAETNDFGPGDVWYFPRGHGHMLECLGDKPAHFILIFDNGYFSEFGTFSITDWIGHTPKALLAKNFKLPESAFDGFPKKEVYFARGAVPPATPAAPLQGLKLPPLTHKYELLEQEPHKVFKGGREWRVDSTRFPISKTVTGVVLDLEPGALRELHWHPNADEWQYVIDGNISVTMFGSHGRVRTEQMEKGDVGYIPQGYGHSIENVGDRPCRVLIGFNTGNYQAIDLSQWIAGNPADVLATNFSKPTSLFEKFPKQDVFIAPGK

SEQ ID NO: 1339 - DNA, 1077 bp, synthetic construct
  misc_feature 1..1077: note = Variant of oxalate decarboxylase from Gemmata sp. SH-PL17
  source 1..1077: mol_type = other DNA
atgggtgaccctacctttatgaacaatgtaccagaccctctgctgtcgggcaaagatttgccgacgttcaagtttgagctggaaaagagcaagggcaaagtcattggggggagttcgggaaaagaagcaaccgttgtccagttacctatctccaaaggcattgctggtgtgagcatggtacttgaaccgggtgcgatgcgcgaattgcactggcatgccacagcagcagagtggacgttcgtattatggggccacgtccgtacgacggtgatcgatccacaaggtctggccgaaaccaacgactttggaccgggcgacgtgtggtattttcctcgcggtcatgggcacatgctggaatgcctgggcgataaaccggcgcatttcattctgatcttcgataacggctacttctcagagtttggcaccttctctattactgactggatcggtcacacaccgaaagcgcttctcgccaagaactttaagctgcccgaaagcgcttttgatgggtttcccaaaaaagaggtctattttgcacgtggcgcggttccaccagccacccctgcagcgcctttacagggactgaagctgccaccactcacgcataaatacgaactcctcgaacaagaacctcataaagtttttaaaggtggtcgtgaatggcgcgtggatagcactcgttttcccatttccaagactgtaaccggcgttgttcttgatttggaacccggcgcgttacgcgagcttcactggcatcctaatgctgacgagtggcaatatgtgatcgatggcaacattagtgtgacgatgttcggttctcatggccgtgtacgcaccgaacagatggagaagggtgatgtcgggtatattccacaggggtatggccacagcatcgaaaatgttggagatcgtccttgtcgcgtcttgattggctttaacacaggtaactaccaagcgatcgacttatcacagtggattgcaggtaatcccgcggatgttcttgccacgaacttctccaaacccaccagcctctttgaaaagttcccaaaacaggacgtgtttattgctcctggcaag

SEQ ID NO: 1340 - protein, 359 aa, synthetic construct
  REGION 1..359: note = Variant of oxalate decarboxylase from Gemmata sp. SH-PL17
MGDPTFMNNVPDPLLSGKDLPTFKFELEKSKGKVIGGSSGKEATVVQLPISKGIAGVSMVLEPGAMRELHWHATAAEWTFVLWGHVRTTVIDPQGLAETNDFGPGDVWYFPRGHGHMLECLGDKPAHFILIFDNGYFSEFGTFSITDWIGHTPKALLAKNFKLPESAFDGFPKKEVYFARGAVPPATPAAPLQGLKLPPLTHKYELLEQEPHKVFKGGREWRVDSTRFPISKTVTGVVLDLEPGALRELHWHPNADEWQYVIDGNISVTMFGSHGRVRTEQMEKGDVGYIPQGYGHSIENVGDRPCRVLIGFNTGNYQAIDLSQWIAGNPADVLATNFSKPTSLFEKFPKQDVFIAPGK

SEQ ID NO: 1341 - DNA, 1077 bp, synthetic construct
  misc_feature 1..1077: note = Variant of oxalate decarboxylase from Gemmata sp. SH-PL17
  source 1..1077: mol_type = other DNA
atgggtgaccctacctttatgaacaatgtaccagaccctctgctgtcgggcaaagatttgccgacgttcaagtttgagctggaaaagagcaagggcaaagtcattggggggagttcgggaaaagaagcaaccgttgtccagttacctatctccaaaggcattgctggtgtgagcatggtacttgaaccgggtgcgatgcgcgaattgcactggcatgccacagcagcagagtgggggttcgtattatggggccacgtccgtacgacggtgatcgatccacaaggtcatgccgaaaccaacgactttggaccgggcgacgtgtggtattttcctcgcggtcatgggcacatgctggaatgcctgggcgataaaccggcgcatttcattctgatcttcgataacggctacttctcagagtttggcaccttctctattactgactggatcggtcacacaccgaaagcgcttctcgccaagaactttaagctgcccgaaagcgcttttgatgggtttcccaaaaaagaggtctattttgcacgtggcgcggttccaccagccacccctgcagcgcctttacagggactgaagctgccaccactcacgcataaatacgaactcctcgaacaagaacctcataaagtttttaaaggtggtcgtgaatggcgcgtggatagcactcgttttcccatttccaagactgtaaccggcgttgttcttgatttggaacccggcgcgttacgcgagcttcactggcatcctaatgctgacgagtggcaatatgtgatcgatggcaacattagtgtgacgatgttcggttctcatggccgtgtacgcaccgaacagatggagaagggtgatgtcgggtatattccacaggggtatggccacagcatcgaaaatgttggagatcgtccttgtcgcgtcttgattggctttaacacaggtaactaccaagcgatcgacttatcacagtggattgcaggtaatcccgcggatgttcttgccacgaacttctccaaacccaccagcctctttgaaaagttcccaaaacaggacgtgtttattgctcctggcaag

SEQ ID NO: 1342 - protein, 359 aa, synthetic construct
  REGION 1..359: note = Variant of oxalate decarboxylase from Gemmata sp. SH-PL17
MGDPTFMNNVPDPLLSGKDLPTFKFELEKSKGKVIGGSSGKEATVVQLPISKGIAGVSMVLEPGAMRELHWHATAAEWGFVLWGHVRTTVIDPQGHAETNDFGPGDVWYFPRGHGHMLECLGDKPAHFILIFDNGYFSEFGTFSITDWIGHTPKALLAKNFKLPESAFDGFPKKEVYFARGAVPPATPAAPLQGLKLPPLTHKYELLEQEPHKVFKGGREWRVDSTRFPISKTVTGVVLDLEPGALRELHWHPNADEWQYVIDGNISVTMFGSHGRVRTEQMEKGDVGYIPQGYGHSIENVGDRPCRVLIGFNTGNYQAIDLSQWIAGNPADVLATNFSKPTSLFEKFPKQDVFIAPGK

SEQ ID NO: 1343 - DNA, 1077 bp, synthetic construct
  misc_feature 1..1077: note = Variant of oxalate decarboxylase from Gemmata sp. SH-PL17
  source 1..1077: mol_type = other DNA
atgggtgaccctacctttatgaacaatgtaccagaccctctgctgtcgggcaaagatttgccgacgttcaagtttgagctggaaaagagcaagggcaaagtcattggggggagttcgggaaaagaagcaaccgttgtccagttacctatctccaaaggcattgctggtgtgagcatggtacttgaaccgggtgcgatgcgcgaattgcactggcatgccacagcagcagagtggtggttcgtattatggggccacgtccgtacgacggtgatcgatccacaaggtctggccgaaaccaacgactttggaccgggcgacgtgtggtattttcctcgcggtcatgggcacatgctggaatgcctgggcgataaaccggcgcatttcattctgatcttcgataacggctacttctcagagtttggcaccttctctattactgactggatcggtcacacaccgaaagcgcttctcgccaagaactttaagctgcccgaaagcgcttttgatgggtttcccaaaaaagaggtctattttgcacgtggcgcggttccaccagccacccctgcagcgcctttacagggactgaagctgccaccactcacgcataaatacgaactcctcgaacaagaacctcataaagtttttaaaggtggtcgtgaatggcgcgtggatagcactcgttttcccatttccaagactgtaaccggcgttgttcttgatttggaacccggcgcgttacgcgagcttcactggcatcctaatgctgacgagtggcaatatgtgatcgatggcaacattagtgtgacgatgttcggttctcatggccgtgtacgcaccgaacagatggagaagggtgatgtcgggtatattccacaggggtatggccacagcatcgaaaatgttggagatcgtccttgtcgcgtcttgattggctttaacacaggtaactaccaagcgatcgacttatcacagtggattgcaggtaatcccgcggatgttcttgccacgaacttctccaaacccaccagcctctttgaaaagttcccaaaacaggacgtgtttattgctcctggcaag

SEQ ID NO: 1344 - protein, 359 aa, synthetic construct
  REGION 1..359: note = Variant of oxalate decarboxylase from Gemmata sp. SH-PL17
MGDPTFMNNVPDPLLSGKDLPTFKFELEKSKGKVIGGSSGKEATVVQLPISKGIAGVSMVLEPGAMRELHWHATAAEWWFVLWGHVRTTVIDPQGLAETNDFGPGDVWYFPRGHGHMLECLGDKPAHFILIFDNGYFSEFGTFSITDWIGHTPKALLAKNFKLPESAFDGFPKKEVYFARGAVPPATPAAPLQGLKLPPLTHKYELLEQEPHKVFKGGREWRVDSTRFPISKTVTGVVLDLEPGALRELHWHPNADEWQYVIDGNISVTMFGSHGRVRTEQMEKGDVGYIPQGYGHSIENVGDRPCRVLIGFNTGNYQAIDLSQWIAGNPADVLATNFSKPTSLFEKFPKQDVFIAPGK

SEQ ID NO: 1345 - DNA, 1077 bp, synthetic construct
  misc_feature 1..1077: note = Variant of oxalate decarboxylase from Gemmata sp. SH-PL17
  source 1..1077: mol_type = other DNA
atgggtgaccctacctttatgaacaatgtaccagaccctctgctgtcgggcaaagatttgccgacgttcaagtttgagctggaaaagagcaagggcaaagtcattggggggagttcgggaaaagaagcaaccgttgtccagttacctatctccaaaggcattgctggtgtgagcatggtacttgaaccgggtgcgatgcgcgaattgcactggcatgccacagcagcagagtgggggttcgtattatggggccacgtccgtacgacggtgatcgatccacaaggtctggccgaaaccaacgactttggaccgggcgacgtgtggtattttcctcgcggtcatgggcacatgctggaatgcctgggcgataaaccggcgcatttcattctgatcttcgataacggctacttctcagagtttggcaccttctctattactgactggatcggtcacacaccgaaagcgcttctcgccaagaactttcttctgcccgaaagcgcttttgatgggtttcccaaaaaagaggtctattttgcacgtggcgcggttccaccagccacccctgcagcgcctttacagggactgaagctgccaccactcacgcataaatacgaactcctcgaacaagaacctcataaagtttttaaaggtggtcgtgaatggcgcgtggatagcactcgttttcccatttccaagactgtaaccggcgttgttcttgatttggaacccggcgcgttacgcgagcttcactggcatcctaatgctgacgagtggcaatatgtgatcgatggcaacattagtgtgacgatgttcggttctcatggccgtgtacgcaccgaacagatggagaagggtgatgtcgggtatattccacaggggtatggccacagcatcgaaaatgttggagatcgtccttgtcgcgtcttgattggctttaacacaggtaactaccaagcgatcgacttatcacagtggattgcaggtaatcccgcggatgttcttgccacgaacttctccaaacccaccagcctctttgaaaagttcccaaaacaggacgtgtttattgctcctggcaag

SEQ ID NO: 1346 - protein, 359 aa, synthetic construct
  REGION 1..359: note = Variant of oxalate decarboxylase from Gemmata sp. SH-PL17
MGDPTFMNNVPDPLLSGKDLPTFKFELEKSKGKVIGGSSGKEATVVQLPISKGIAGVSMVLEPGAMRELHWHATAAEWGFVLWGHVRTTVIDPQGLAETNDFGPGDVWYFPRGHGHMLECLGDKPAHFILIFDNGYFSEFGTFSITDWIGHTPKALLAKNFLLPESAFDGFPKKEVYFARGAVPPATPAAPLQGLKLPPLTHKYELLEQEPHKVFKGGREWRVDSTRFPISKTVTGVVLDLEPGALRELHWHPNADEWQYVIDGNISVTMFGSHGRVRTEQMEKGDVGYIPQGYGHSIENVGDRPCRVLIGFNTGNYQAIDLSQWIAGNPADVLATNFSKPTSLFEKFPKQDVFIAPGK

SEQ ID NO: 1347 - DNA, 1077 bp, synthetic construct
  misc_feature 1..1077: note = Variant of oxalate decarboxylase from Gemmata sp. SH-PL17
  source 1..1077: mol_type = other DNA
atgggtgaccctacctttatgaacaatgtaccagaccctctgctgtcgggcaaagatttgccgacgttcaagtttgagctggaaaagagcaagggcaaagtcattggggggagttcgggaaaagaagcaaccgttgtccagttacctatctccaaaggcattgctggtgtgagcatggtacttgaaccgggtgcgatgcgcgaattgcactggcatgccacagcagcagagtgggggttcgtattatggggccacgtccgtacgacggtgatcgatccacaaggtctggccgaaaccaacgactttggaccgggcgacgtgtggtattttcctcgcggtcatgggcacatgctggaatgcctgggcgataaaccggcgcatttcattctgatcttcgataacggctacttctcagagtttggcaccttctctattactgactggatcggtcacacaccgaaagcgcttctcgccaagaactttaagctgcccgaaagcgcttttgatgggtttcccaaaaaagaggtctattttgcacgtggcgcggttccaccagccacccctgcagcgcctttacagggactgaagctgccaccactcacgcataaatacgaactcctcgaacaagaacctcataaagtttttaaaggtggtcgtgaatggcgcgtggatagcactcgttttcccatttccaagactgtaaccggcgttgttcttgatttggaacccggcgcgttacgcgagcttcactggcatcctaatgctgacgagtggcaatatgtgatcgatggcaacattagtgtgacgatgttcggttctcatggccgtgtacgcaccgaacagatggagaagggtgatgtcgggtatattccacaggggtatggccacagcatcgaaaatgttggagatcgtccttgtcgcgtcttgattggctttaacacaggtaactacgaggcgatcgacttatcacagtggattgcaggtaatcccgcggatgttcttgccacgaacttctccaaacccaccagcctctttgaaaagttcccaaaacaggacgtgtttattgctcctggcaag

SEQ ID NO: 1348 - protein, 359 aa, synthetic construct
  REGION 1..359: note = Variant of oxalate decarboxylase from Gemmata sp. SH-PL17
MGDPTFMNNVPDPLLSGKDLPTFKFELEKSKGKVIGGSSGKEATVVQLPISKGIAGVSMVLEPGAMRELHWHATAAEWGFVLWGHVRTTVIDPQGLAETNDFGPGDVWYFPRGHGHMLECLGDKPAHFILIFDNGYFSEFGTFSITDWIGHTPKALLAKNFKLPESAFDGFPKKEVYFARGAVPPATPAAPLQGLKLPPLTHKYELLEQEPHKVFKGGREWRVDSTRFPISKTVTGVVLDLEPGALRELHWHPNADEWQYVIDGNISVTMFGSHGRVRTEQMEKGDVGYIPQGYGHSIENVGDRPCRVLIGFNTGNYEAIDLSQWIAGNPADVLATNFSKPTSLFEKFPKQDVFIAPGK

SEQ ID NO: 1349 - DNA, 1077 bp, synthetic construct
  misc_feature 1..1077: note = Variant of oxalate decarboxylase from Gemmata sp. SH-PL17
  source 1..1077: mol_type = other DNA
atgggtgaccctacctttatgaacaatgtaccagaccctctgctgtcgggcaaagatttgccgacgttcaagtttgagctggaaaagagcgcgggcaaagtcattggggggagttcgggaaaagaagcaaccgttgtccagttacctatctccaaaggcattgctggtgtgagcatggtacttgaaccgggtgcgatgcgcgaattgcactggcatgccacagcagcagagtgggggttcgtattatggggccacgtccgtacgacggtgatcgatccacaaggtctggccgaaaccaacgactttggaccgggcgacgtgtggtattttcctcgcggtcatgggcacatgctggaatgcctgggcgataaaccggcgcatttcattctgatcttcgataacggctacttctcagagtttggcaccttctctattactgactggatcggtcacacaccgaaagcgcttctcgccaagaactttaagctgcccgaaagcgcttttgatgggtttcccaaaaaagaggtctattttgcacgtggcgcggttccaccagccacccctgcagcgcctttacagggactgaagctgccaccactcacgcataaatacgaactcctcgaacaagaacctcataaagtttttaaaggtggtcgtgaatggcgcgtggatagcactcgttttcccatttccaagactgtaaccggcgttgttcttgatttggaacccggcgcgttacgcgagcttcactggcatcctaatgctgacgagtggcaatatgtgatcgatggcaacattagtgtgacgatgttcggttctcatggccgtgtacgcaccgaacagatggagaagggtgatgtcgggtatattccacaggggtatggccacagcatcgaaaatgttggagatcgtccttgtcgcgtcttgattggctttaacacaggtaactaccaagcgatcgacttatcacagtggattgcaggtaatcccgcggatgttcttgccacgaacttctccaaacccaccagcctctttgaaaagttcccaaaacaggacgtgtttattgctcctggcaag

SEQ ID NO: 1350 - protein, 359 aa, synthetic construct
  REGION 1..359: note = Variant of oxalate decarboxylase from Gemmata sp. SH-PL17
MGDPTFMNNVPDPLLSGKDLPTFKFELEKSAGKVIGGSSGKEATVVQLPISKGIAGVSMVLEPGAMRELHWHATAAEWGFVLWGHVRTTVIDPQGLAETNDFGPGDVWYFPRGHGHMLECLGDKPAHFILIFDNGYFSEFGTFSITDWIGHTPKALLAKNFKLPESAFDGFPKKEVYFARGAVPPATPAAPLQGLKLPPLTHKYELLEQEPHKVFKGGREWRVDSTRFPISKTVTGVVLDLEPGALRELHWHPNADEWQYVIDGNISVTMFGSHGRVRTEQMEKGDVGYIPQGYGHSIENVGDRPCRVLIGFNTGNYQAIDLSQWIAGNPADVLATNFSKPTSLFEKFPKQDVFIAPGK

SEQ ID NO: 1351 - DNA, 1077 bp, synthetic construct
  misc_feature 1..1077: note = Variant of oxalate decarboxylase from Gemmata sp. SH-PL17
  source 1..1077: mol_type = other DNA
atgggtgaccctacctttatgaacaatgtaccagaccctctgctgtcgggcaaagatttgccgacgttcaagtttgagctggaaaagagcaagggcaaagtcattggggggagttcgggaaaagaagcaaccgttgtccagttacctatctccaaaggcattgctggtgtgagcatggtacttgaaccgggtgcgatgcgcgaattgcactggcatgccacagcagcagagtgggggttcgtattatggggccacgtccgtacgacggtgatcgatccacaaggtctggccgaaaccaacgactttggaccgggcgacgtgtggtattttcctcgcggtcatgggcacatgctggaatgcctgggcgataaaccggcgcatttcattctgatcttcgataacggctacttctcagagtttggcaccttctctattactgactggatcggtcacacaccgaaagcgcttctcgccaagaactttaagctgcccgaaagcgcttttgatgggtttcccaaaaaagaggtctattttgcacgtggcgcggttccaccagccacccctgcagcgcctttacagggactgaagctgccaccactcacgcataaatacgaactcctcgaacaatgtcctcataaagtttttaaaggtggtcgtgaatggcgcgtggatagcactcgttttcccatttccaagactgtaaccggcgttgttcttgatttggaacccggcgcgttacgcgagcttcactggcatcctaatgctgacgagtggcaatatgtgatcgatggcaacattagtgtgacgatgttcggttctcatggccgtgtacgcaccgaacagatggagaagggtgatgtcgggtatattccacaggggtatggccacagcatcgaaaatgttggagatcgtccttgtcgcgtcttgattggctttaacacaggtaactaccaagcgatcgacttatcacagtggattgcaggtaatcccgcggatgttcttgccacgaacttctccaaacccaccagcctctttgaaaagttcccaaaacaggacgtgtttattgctcctggcaag

SEQ ID NO: 1352 - protein, 359 aa, synthetic construct
  REGION 1..359: note = Variant of oxalate decarboxylase from Gemmata sp. SH-PL17
MGDPTFMNNVPDPLLSGKDLPTFKFELEKSKGKVIGGSSGKEATVVQLPISKGIAGVSMVLEPGAMRELHWHATAAEWGFVLWGHVRTTVIDPQGLAETNDFGPGDVWYFPRGHGHMLECLGDKPAHFILIFDNGYFSEFGTFSITDWIGHTPKALLAKNFKLPESAFDGFPKKEVYFARGAVPPATPAAPLQGLKLPPLTHKYELLEQCPHKVFKGGREWRVDSTRFPISKTVTGVVLDLEPGALRELHWHPNADEWQYVIDGNISVTMFGSHGRVRTEQMEKGDVGYIPQGYGHSIENVGDRPCRVLIGFNTGNYQAIDLSQWIAGNPADVLATNFSKPTSLFEKFPKQDVFIAPGK

SEQ ID NO: 1353 - DNA, 1077 bp, synthetic construct
  misc_feature 1..1077: note = Variant of oxalate decarboxylase from Gemmata sp. SH-PL17
  source 1..1077: mol_type = other DNA
atgggtgaccctacctttatgaacaatgtaccagaccctctgctgtcgaataaagatttgccgacgttcaagtttgagctggaaaagagcaagggcaaagtcattggggggagttcgggaaaagaagcaaccgttgtccagttacctatctccaaaggcattgctggtgtgagcatggtacttgaaccgggtgcgatgcgcgaattgcactggcatgccacagcagcagagtgggggttcgtattatggggccacgtccgtacgacggtgatcgatccacaaggtctggccgaaaccaacgactttggaccgggcgacgtgtggtattttcctcgcggtcatgggcacatgctggaatgcctgggcgataaaccggcgcatttcattctgatcttcgataacggctacttctcagagtttggcaccttctctattactgactggatcggtcacacaccgaaagcgcttctcgccaagaactttaagctgcccgaaagcgcttttgatgggtttcccaaaaaagaggtctattttgcacgtggcgcggttccaccagccacccctgcagcgcctttacagggactgaagctgccaccactcacgcataaatacgaactcctcgaacaagaacctcataaagtttttaaaggtggtcgtgaatggcgcgtggatagcactcgttttcccatttccaagactgtaaccggcgttgttcttgatttggaacccggcgcgttacgcgagcttcactggcatcctaatgctgacgagtggcaatatgtgatcgatggcaacattagtgtgacgatgttcggttctcatggccgtgtacgcaccgaacagatggagaagggtgatgtcgggtatattccacaggggtatggccacagcatcgaaaatgttggagatcgtccttgtcgcgtcttgattggctttaacacaggtaactaccaagcgatcgacttatcacagtggattgcaggtaatcccgcggatgttcttgccacgaacttctccaaacccaccagcctctttgaaaagttcccaaaacaggacgtgtttattgctcctggcaag

SEQ ID NO: 1354 - protein, 359 aa, synthetic construct
  REGION 1..359: note = Variant of oxalate decarboxylase from Gemmata sp. SH-PL17
MGDPTFMNNVPDPLLSNKDLPTFKFELEKSKGKVIGGSSGKEATVVQLPISKGIAGVSMVLEPGAMRELHWHATAAEWGFVLWGHVRTTVIDPQGLAETNDFGPGDVWYFPRGHGHMLECLGDKPAHFILIFDNGYFSEFGTFSITDWIGHTPKALLAKNFKLPESAFDGFPKKEVYFARGAVPPATPAAPLQGLKLPPLTHKYELLEQEPHKVFKGGREWRVDSTRFPISKTVTGVVLDLEPGALRELHWHPNADEWQYVIDGNISVTMFGSHGRVRTEQMEKGDVGYIPQGYGHSIENVGDRPCRVLIGFNTGNYQAIDLSQWIAGNPADVLATNFSKPTSLFEKFPKQDVFIAPGK

SEQ ID NO: 1355 - DNA, 1077 bp, synthetic construct
  misc_feature 1..1077: note = Variant of oxalate decarboxylase from Gemmata sp. SH-PL17
  source 1..1077: mol_type = other DNA
atgggtgaccctacctttatgaacaatgtaccagaccctctgctgtcgggcaaagatttgccgacgttcaagtttgagctggaaaagagcaagggcaaagtcattggggggagttcgggaaaagaagcaaccgttgtccagttacctatctccaaaggcattgctggtgtgagcatggtacttgaaccgggtgcgatgcgcgaattgcactggcatgccacagcagcagagtgggggttcgtattatggggccacgtccgtacgacggtgatcgatccacaaggtctggccgaaaccaacgactttggaccgggcgacgtgtggtattttcctcgcggtcatgggcacatgctggaatgcctgggcgataaaccggcgcatttcattctgatcttcgataacggctacttctcagagtttggcaccttctctattactgactggatcggtcacacaccgaaagcgcttctcgccaagaactttaagctgcccgaaagcgcttttgatgggtttcccaaaaaagaggtctattttgcacgtggcgcggttccaccagccacccctgcagcgcctttacagggaaagaagctgccaccactcacgcataaatacgaactcctcgaacaagaacctcataaagtttttaaaggtggtcgtgaatggcgcgtggatagcactcgttttcccatttccaagactgtaaccggcgttgttcttgatttggaacccggcgcgttacgcgagcttcactggcatcctaatgctgacgagtggcaatatgtgatcgatggcaacattagtgtgacgatgttcggttctcatggccgtgtacgcaccgaacagatggagaagggtgatgtcgggtatattccacaggggtatggccacagcatcgaaaatgttggagatcgtccttgtcgcgtcttgattggctttaacacaggtaactaccaagcgatcgacttatcacagtggattgcaggtaatcccgcggatgttcttgccacgaacttctccaaacccaccagcctctttgaaaagttcccaaaacaggacgtgtttattgctcctggcaag

SEQ ID NO: 1356 - protein, 359 aa, synthetic construct
  REGION 1..359: note = Variant of oxalate decarboxylase from Gemmata sp. SH-PL17
MGDPTFMNNVPDPLLSGKDLPTFKFELEKSKGKVIGGSSGKEATVVQLPISKGIAGVSMVLEPGAMRELHWHATAAEWGFVLWGHVRTTVIDPQGLAETNDFGPGDVWYFPRGHGHMLECLGDKPAHFILIFDNGYFSEFGTFSITDWIGHTPKALLAKNFKLPESAFDGFPKKEVYFARGAVPPATPAAPLQGKKLPPLTHKYELLEQEPHKVFKGGREWRVDSTRFPISKTVTGVVLDLEPGALRELHWHPNADEWQYVIDGNISVTMFGSHGRVRTEQMEKGDVGYIPQGYGHSIENVGDRPCRVLIGFNTGNYQAIDLSQWIAGNPADVLATNFSKPTSLFEKFPKQDVFIAPGK

SEQ ID NO: 1357 - DNA, 1077 bp, synthetic construct
  misc_feature 1..1077: note = Variant of oxalate decarboxylase from Gemmata sp. SH-PL17
  source 1..1077: mol_type = other DNA
atgggtgaccctacctttatgaacaatgtaccagaccctctgctgtcgggcaaagatttgccgacgttcaagtttgagctggaaaagagcaagggcaaagtcattggggggagttcgggaaaagaagcaaccgttgtccagttacctatctccaaaggcattgctggtgtgagcatggtacttgaaccgggtgcgatgcgcgaattgcactggcatgccacagcagcagagtgggggttcgtattatggggccacgtccgtacgacggtgatcgatccacaaggtctggccgaaaccaacgactttggaccgggcgacgtgtggtattttcctcgcggtcatgggcacatgctggaatgcctgggcgataaaccggcgcatttcattctgatcttcgataacggctacttctcagagtttggcaccttctctattactgactggatcggtcacacaccgaaagcgcttctcgccaagaactttaagctgcccgaaagcgcttttgatgggtttcccaaaaaagaggtctattttgcacgtggcgcggttccaccagccacccctgcagcgcctttacagggactgaagctgccaccactcacgcataaatacgaactcctcgaacaagaacctcataaagtttttaaaggtggtcgtgaatggcgcgtggatagcactcgttttcccatttccaagactgtaaccggcgttgttcttgatttggaacccggcgcgttacgcgagcttcactggcatcctaatgctgacgagtggcaatatgtgatcgatggcaacattagtgtgacgatgttcggttctcatggccgtgtacgcaccgaacagatggagaagggtgatgtcgggtatattccacaggggtatggccacagcatcgaaaatgttggagatcgtccttgtcgcgtcttgattggctttaacacaggtaactactatgcgatcgacttatcacagtggattgcaggtaatcccgcggatgttcttgccacgaacttctccaaacccaccagcctctttgaaaagttcccaaaacaggacgtgtttattgctcctggcaag

SEQ ID NO: 1358 - protein, 359 aa, synthetic construct
  REGION 1..359: note = Variant of oxalate decarboxylase from Gemmata sp. SH-PL17
MGDPTFMNNVPDPLLSGKDLPTFKFELEKSKGKVIGGSSGKEATVVQLPISKGIAGVSMVLEPGAMRELHWHATAAEWGFVLWGHVRTTVIDPQGLAETNDFGPGDVWYFPRGHGHMLECLGDKPAHFILIFDNGYFSEFGTFSITDWIGHTPKALLAKNFKLPESAFDGFPKKEVYFARGAVPPATPAAPLQGLKLPPLTHKYELLEQEPHKVFKGGREWRVDSTRFPISKTVTGVVLDLEPGALRELHWHPNADEWQYVIDGNISVTMFGSHGRVRTEQMEKGDVGYIPQGYGHSIENVGDRPCRVLIGFNTGNYYAIDLSQWIAGNPADVLATNFSKPTSLFEKFPKQDVFIAPGK

SEQ ID NO: 1359 - DNA, 1077 bp, synthetic construct
  misc_feature 1..1077: note = Variant of oxalate decarboxylase from Gemmata sp. SH-PL17
  source 1..1077: mol_type = other DNA
atgggtgaccctacctttatgaacaatgtaccagaccctctgctgtcgcataaagatttgccgacgttcaagtttgagctggaaaagagcaagggcaaagtcattggggggagttcgggaaaagaagcaaccgttgtccagttacctatctccaaaggcattgctggtgtgagcatggtacttgaaccgggtgcgatgcgcgaattgcactggcatgccacagcagcagagtgggggttcgtattatggggccacgtccgtacgacggtgatcgatccacaaggtctggccgaaaccaacgactttggaccgggcgacgtgtggtattttcctcgcggtcatgggcacatgctggaatgcctgggcgataaaccggcgcatttcattctgatcttcgataacggctacttctcagagtttggcaccttctctattactgactggatcggtcacacaccgaaagcgcttctcgccaagaactttaagctgcccgaaagcgcttttgatgggtttcccaaaaaagaggtctattttgcacgtggcgcggttccaccagccacccctgcagcgcctttacagggactgaagctgccaccactcacgcataaatacgaactcctcgaacaagaacctcataaagtttttaaaggtggtcgtgaatggcgcgtggatagcactcgttttcccatttccaagactgtaaccggcgttgttcttgatttggaacccggcgcgttacgcgagcttcactggcatcctaatgctgacgagtggcaatatgtgatcgatggcaacattagtgtgacgatgttcggttctcatggccgtgtacgcaccgaacagatggagaagggtgatgtcgggtatattccacaggggtatggccacagcatcgaaaatgttggagatcgtccttgtcgcgtcttgattggctttaacacaggtaactaccaagcgatcgacttatcacagtggattgcaggtaatcccgcggatgttcttgccacgaacttctccaaacccaccagcctctttgaaaagttcccaaaacaggacgtgtttattgctcctggcaag

SEQ ID NO: 1360 - protein, 359 aa, synthetic construct
  REGION 1..359: note = Variant of oxalate decarboxylase from Gemmata sp. SH-PL17
MGDPTFMNNVPDPLLSHKDLPTFKFELEKSKGKVIGGSSGKEATVVQLPISKGIAGVSMVLEPGAMRELHWHATAAEWGFVLWGHVRTTVIDPQGLAETNDFGPGDVWYFPRGHGHMLECLGDKPAHFILIFDNGYFSEFGTFSITDWIGHTPKALLAKNFKLPESAFDGFPKKEVYFARGAVPPATPAAPLQGLKLPPLTHKYELLEQEPHKVFKGGREWRVDSTRFPISKTVTGVVLDLEPGALRELHWHPNADEWQYVIDGNISVTMFGSHGRVRTEQMEKGDVGYIPQGYGHSIENVGDRPCRVLIGFNTGNYQAIDLSQWIAGNPADVLATNFSKPTSLFEKFPKQDVFIAPGK

SEQ ID NO: 1361 - DNA, 1077 bp, synthetic construct
  misc_feature 1..1077: note = Variant of oxalate decarboxylase from Gemmata sp. SH-PL17
  source 1..1077: mol_type = other DNA
atgggtgaccctacctttatgaacaatgtaccagacatgctgctgtcgggcaaagatttgccgacgttcaagtttgagctggaaaagagcaagggcaaagtcattggggggagttcgggaaaagaagcaaccgttgtccagttacctatctccaaaggcattgctggtgtgagcatggtacttgaaccgggtgcgatgcgcgaattgcactggcatgccacagcagcagagtgggggttcgtattatggggccacgtccgtacgacggtgatcgatccacaaggtctggccgaaaccaacgactttggaccgggcgacgtgtggtattttcctcgcggtcatgggcacatgctggaatgcctgggcgataaaccggcgcatttcattctgatcttcgataacggctacttctcagagtttggcaccttctctattactgactggatcggtcacacaccgaaagcgcttctcgccaagaactttaagctgcccgaaagcgcttttgatgggtttcccaaaaaagaggtctattttgcacgtggcgcggttccaccagccacccctgcagcgcctttacagggactgaagctgccaccactcacgcataaatacgaactcctcgaacaagaacctcataaagtttttaaaggtggtcgtgaatggcgcgtggatagcactcgttttcccatttccaagactgtaaccggcgttgttcttgatttggaacccggcgcgttacgcgagcttcactggcatcctaatgctgacgagtggcaatatgtgatcgatggcaacattagtgtgacgatgttcggttctcatggccgtgtacgcaccgaacagatggagaagggtgatgtcgggtatattccacaggggtatggccacagcatcgaaaatgttggagatcgtccttgtcgcgtcttgattggctttaacacaggtaactaccaagcgatcgacttatcacagtggattgcaggtaatcccgcggatgttcttgccacgaacttctccaaacccaccagcctctttgaaaagttcccaaaacaggacgtgtttattgctcctggcaag

SEQ ID NO: 1362 - protein, 359 aa, synthetic construct
  REGION 1..359: note = Variant of oxalate decarboxylase from Gemmata sp. SH-PL17
MGDPTFMNNVPDMLLSGKDLPTFKFELEKSKGKVIGGSSGKEATVVQLPISKGIAGVSMVLEPGAMRELHWHATAAEWGFVLWGHVRTTVIDPQGLAETNDFGPGDVWYFPRGHGHMLECLGDKPAHFILIFDNGYFSEFGTFSITDWIGHTPKALLAKNFKLPESAFDGFPKKEVYFARGAVPPATPAAPLQGLKLPPLTHKYELLEQEPHKVFKGGREWRVDSTRFPISKTVTGVVLDLEPGALRELHWHPNADEWQYVIDGNISVTMFGSHGRVRTEQMEKGDVGYIPQGYGHSIENVGDRPCRVLIGFNTGNYQAIDLSQWIAGNPADVLATNFSKPTSLFEKFPKQDVFIAPGK

SEQ ID NO: 1363 - DNA, 1077 bp, synthetic construct
  misc_feature 1..1077: note = Variant of oxalate decarboxylase from Gemmata sp. SH-PL17
  source 1..1077: mol_type = other DNA
atgggtgaccctacctttatgaacaatgtaccagaccctctgctgtcgggcaaagatttgccgacgttcaagtttgagctggaaaagagcaagggcaaagtcattggggggagttcgggaaaagaagcaaccgttgtccagttacctatctccaaaggcattgctggtgtgagcatggatcttgaaccgggtgcgatgcgcgaattgcactggcatgccacagcagcagagtgggggttcgtattatggggccacgtccgtacgacggtgatcgatccacaaggtctggccgaaaccaacgactttggaccgggcgacgtgtggtattttcctcgcggtcatgggcacatgctggaatgcctgggcgataaaccggcgcatttcattctgatcttcgataacggctacttctcagagtttggcaccttctctattactgactggatcggtcacacaccgaaagcgcttctcgccaagaactttaagctgcccgaaagcgcttttgatgggtttcccaaaaaagaggtctattttgcacgtggcgcggttccaccagccacccctgcagcgcctttacagggactgaagctgccaccactcacgcataaatacgaactcctcgaacaagaacctcataaagtttttaaaggtggtcgtgaatggcgcgtggatagcactcgttttcccatttccaagactgtaaccggcgttgttcttgatttggaacccggcgcgttacgcgagcttcactggcatcctaatgctgacgagtggcaatatgtgatcgatggcaacattagtgtgacgatgttcggttctcatggccgtgtacgcaccgaacagatggagaagggtgatgtcgggtatattccacaggggtatggccacagcatcgaaaatgttggagatcgtccttgtcgcgtcttgattggctttaacacaggtaactaccaagcgatcgacttatcacagtggattgcaggtaatcccgcggatgttcttgccacgaacttctccaaacccaccagcctctttgaaaagttcccaaaacaggacgtgtttattgctcctggcaag

SEQ ID NO: 1364 - protein, 359 aa, synthetic construct
  REGION 1..359: note = Variant of oxalate decarboxylase from Gemmata sp. SH-PL17
MGDPTFMNNVPDPLLSGKDLPTFKFELEKSKGKVIGGSSGKEATVVQLPISKGIAGVSMDLEPGAMRELHWHATAAEWGFVLWGHVRTTVIDPQGLAETNDFGPGDVWYFPRGHGHMLECLGDKPAHFILIFDNGYFSEFGTFSITDWIGHTPKALLAKNFKLPESAFDGFPKKEVYFARGAVPPATPAAPLQGLKLPPLTHKYELLEQEPHKVFKGGREWRVDSTRFPISKTVTGVVLDLEPGALRELHWHPNADEWQYVIDGNISVTMFGSHGRVRTEQMEKGDVGYIPQGYGHSIENVGDRPCRVLIGFNTGNYQAIDLSQWIAGNPADVLATNFSKPTSLFEKFPKQDVFIAPGK

SEQ ID NO: 1365 - DNA, 1077 bp, synthetic construct
  misc_feature 1..1077: note = Variant of oxalate decarboxylase from Gemmata sp. SH-PL17
  source 1..1077: mol_type = other DNA
atgggtgaccctacctttatgaacaatgtaccagaccctctgctgtcgggcaaagatttgccgacgttcaagtttgagctggaaaagagcaagggcaaagtcattggggggagttcgggaaaagaagcaaccgttgtccagttacctatctccaaaggcattgctggtgtgagcatggtacttgaaccgggtgcgatgcgcgaattgcactggcatgccacagcagcagagtgggggttcgtattatggggccacgtccgtacgacggtgatcgatccacaaggtctggccgaaaccaacgactttggaccgggcgacgtgtggtattttcctcgcggtcatgggcacatgctggaatgcctgggcgataaaccggcgcatttcattctgatcttcgataacggctacttctcagagtttggcaccttctctattactgactggatcggtcacacaccgaaagcgcttctcgccaagaactttaagctgcccgaaagcgcttttgatgggtttcccaaaaaagaggtctattttgcacgtggcgcggttccaccagccacccctgcagcgcctttacagggactgaagctgccaccactcacgcataaatacgaactcctcgaacaagaacctcataaagtttttaaaggtggtcgtgaatggcgcgtggatagcactcgttttcccatttccaagactgtaaccggcgttgttcttgatttggaacccggcgcgttacgcgagcttcactggcatcctaatgctgacgagtggcaatatgtgatcgatggcaacattagtgtgacgatgttcggttctcatggccgtaagcgcaccgaacagatggagaagggtgatgtcgggtatattccacaggggtatggccacagcatcgaaaatgttggagatcgtccttgtcgcgtcttgattggctttaacacaggtaactaccaagcgatcgacttatcacagtggattgcaggtaatcccgcggatgttcttgccacgaacttctccaaacccaccagcctctttgaaaagttcccaaaacaggacgtgtttattgctcctggcaag

SEQ ID NO: 1366 - protein, 359 aa, synthetic construct
  REGION 1..359: note = Variant of oxalate decarboxylase from Gemmata sp. SH-PL17
MGDPTFMNNVPDPLLSGKDLPTFKFELEKSKGKVIGGSSGKEATVVQLPISKGIAGVSMVLEPGAMRELHWHATAAEWGFVLWGHVRTTVIDPQGLAETNDFGPGDVWYFPRGHGHMLECLGDKPAHFILIFDNGYFSEFGTFSITDWIGHTPKALLAKNFKLPESAFDGFPKKEVYFARGAVPPATPAAPLQGLKLPPLTHKYELLEQEPHKVFKGGREWRVDSTRFPISKTVTGVVLDLEPGALRELHWHPNADEWQYVIDGNISVTMFGSHGRKRTEQMEKGDVGYIPQGYGHSIENVGDRPCRVLIGFNTGNYQAIDLSQWIAGNPADVLATNFSKPTSLFEKFPKQDVFIAPGK

SEQ ID NO: 1367 - DNA, 1077 bp, synthetic construct
  misc_feature 1..1077: note = Variant of oxalate decarboxylase from Gemmata sp. SH-PL17
  source 1..1077: mol_type = other DNA
atgggtgaccctacctttatgaacaatgtaccagaccctctgctgaatggcaaagatttgccgacgttcaagtttgagctggaaaagagcaagggcaaagtcattggggggagttcgggaaaagaagcaaccgttgtccagttacctatctccaaaggcattgctggtgtgagcatggtacttgaaccgggtgcgatgcgcgaattgcactggcatgccacagcagcagagtgggggttcgtattatggggccacgtccgtacgacggtgatcgatccacaaggtctggccgaaaccaacgactttggaccgggcgacgtgtggtattttcctcgcggtcatgggcacatgctggaatgcctgggcgataaaccggcgcatttcattctgatcttcgataacggctacttctcagagtttggcaccttctctattactgactggatcggtcacacaccgaaagcgcttctcgccaagaactttaagctgcccgaaagcgcttttgatgggtttcccaaaaaagaggtctattttgcacgtggcgcggttccaccagccacccctgcagcgcctttacagggactgaagctgccaccactcacgcataaatacgaactcctcgaacaagaacctcataaagtttttaaaggtggtcgtgaatggcgcgtggatagcactcgttttcccatttccaagactgtaaccggcgttgttcttgatttggaacccggcgcgttacgcgagcttcactggcatcctaatgctgacgagtggcaatatgtgatcgatggcaacattagtgtgacgatgttcggttctcatggccgtgtacgcaccgaacagatggagaagggtgatgtcgggtatattccacaggggtatggccacagcatcgaaaatgttggagatcgtccttgtcgcgtcttgattggctttaacacaggtaactaccaagcgatcgacttatcacagtggattgcaggtaatcccgcggatgttcttgccacgaacttctccaaacccaccagcctctttgaaaagttcccaaaacaggacgtgtttattgctcctggcaag

SEQ ID NO: 1368 - protein, 359 aa, synthetic construct
  REGION 1..359: note = Variant of oxalate decarboxylase from Gemmata sp. SH-PL17
MGDPTFMNNVPDPLLNGKDLPTFKFELEKSKGKVIGGSSGKEATVVQLPISKGIAGVSMVLEPGAMRELHWHATAAEWGFVLWGHVRTTVIDPQGLAETNDFGPGDVWYFPRGHGHMLECLGDKPAHFILIFDNGYFSEFGTFSITDWIGHTPKALLAKNFKLPESAFDGFPKKEVYFARGAVPPATPAAPLQGLKLPPLTHKYELLEQEPHKVFKGGREWRVDSTRFPISKTVTGVVLDLEPGALRELHWHPNADEWQYVIDGNISVTMFGSHGRVRTEQMEKGDVGYIPQGYGHSIENVGDRPCRVLIGFNTGNYQAIDLSQWIAGNPADVLATNFSKPTSLFEKFPKQDVFIAPGK

SEQ ID NO: 1369 - DNA, 1077 bp, synthetic construct
  misc_feature 1..1077: note = Variant of oxalate decarboxylase from Gemmata sp. SH-PL17
  source 1..1077: mol_type = other DNA
atgggtgaccctacctttatgaacaatgtaccagaccctctgctgtcgggcaaagatttgccgacgttcaagtttgagctggaaaagagcaagggcaaagtcattggggggagttcgggaaaagaagcaaccgttgtccagttacctatctccaaaggcattgctggtgtgagcatggtacttgaaccgggtgcgatgcgcgaattgcactggcatgccacagcagcagagtggtgtttcgtattatggggccacgtccgtacgacggtgatcgatccacaaggtctggccgaaaccaacgactttggaccgggcgacgtgtggtattttcctcgcggtcatgggcacatgctggaatgcctgggcgataaaccggcgcatttcattctgatcttcgataacggctacttctcagagtttggcaccttctctattactgactggatcggtcacacaccgaaagcgcttctcgccaagaactttaagctgcccgaaagcgcttttgatgggtttcccaaaaaagaggtctattttgcacgtggcgcggttccaccagccacccctgcagcgcctttacagggactgaagctgccaccactcacgcataaatacgaactcctcgaacaagaacctcataaagtttttaaaggtggtcgtgaatggcgcgtggatagcactcgttttcccatttccaagactgtaaccggcgttgttcttgatttggaacccggcgcgttacgcgagcttcactggcatcctaatgctgacgagtggcaatatgtgatcgatggcaacattagtgtgacgatgttcggttctcatggccgtgtacgcaccgaacagatggagaagggtgatgtcgggtatattccacaggggtatggccacagcatcgaaaatgttggagatcgtccttgtcgcgtcttgattggctttaacacaggtaactaccaagcgatcgacttatcacagtggattgcaggtaatcccgcggatgttcttgccacgaacttctccaaacccaccagcctctttgaaaagttcccaaaacaggacgtgtttattgctcctggcaag

SEQ ID NO: 1370 - protein, 359 aa, synthetic construct
  REGION 1..359: note = Variant of oxalate decarboxylase from Gemmata sp. SH-PL17
MGDPTFMNNVPDPLLSGKDLPTFKFELEKSKGKVIGGSSGKEATVVQLPISKGIAGVSMVLEPGAMRELHWHATAAEWCFVLWGHVRTTVIDPQGLAETNDFGPGDVWYFPRGHGHMLECLGDKPAHFILIFDNGYFSEFGTFSITDWIGHTPKALLAKNFKLPESAFDGFPKKEVYFARGAVPPATPAAPLQGLKLPPLTHKYELLEQEPHKVFKGGREWRVDSTRFPISKTVTGVVLDLEPGALRELHWHPNADEWQYVIDGNISVTMFGSHGRVRTEQMEKGDVGYIPQGYGHSIENVGDRPCRVLIGFNTGNYQAIDLSQWIAGNPADVLATNFSKPTSLFEKFPKQDVFIAPGK

SEQ ID NO: 1371 - DNA, 1077 bp, synthetic construct
  misc_feature 1..1077: note = Variant of oxalate decarboxylase from Gemmata sp. SH-PL17
  source 1..1077: mol_type = other DNA
atgggtgaccctacctttatgaacaatgtaccagacaagctgctgtcgggcaaagatttgccgacgttcaagtttgagctggaaaagagcaagggcaaagtcattggggggagttcgggaaaagaagcaaccgttgtccagttacctatctccaaaggcattgctggtgtgagcatggtacttgaaccgggtgcgatgcgcgaattgcactggcatgccacagcagcagagtgggggttcgtattatggggccacgtccgtacgacggtgatcgatccacaaggtctggccgaaaccaacgactttggaccgggcgacgtgtggtattttcctcgcggtcatgggcacatgctggaatgcctgggcgataaaccggcgcatttcattctgatcttcgataacggctacttctcagagtttggcaccttctctattactgactggatcggtcacacaccgaaagcgcttctcgccaagaactttaagctgcccgaaagcgcttttgatgggtttcccaaaaaagaggtctattttgcacgtggcgcggttccaccagccacccctgcagcgcctttacagggactgaagctgccaccactcacgcataaatacgaactcctcgaacaagaacctcataaagtttttaaaggtggtcgtgaatggcgcgtggatagcactcgttttcccatttccaagactgtaaccggcgttgttcttgatttggaacccggcgcgttacgcgagcttcactggcatcctaatgctgacgagtggcaatatgtgatcgatggcaacattagtgtgacgatgttcggttctcatggccgtgtacgcaccgaacagatggagaagggtgatgtcgggtatattccacaggggtatggccacagcatcgaaaatgttggagatcgtccttgtcgcgtcttgattggctttaacacaggtaactaccaagcgatcgacttatcacagtggattgcaggtaatcccgcggatgttcttgccacgaacttctccaaacccaccagcctctttgaaaagttcccaaaacaggacgtgtttattgctcctggcaag

SEQ ID NO: 1372 - protein, 359 aa, synthetic construct
  REGION 1..359: note = Variant of oxalate decarboxylase from Gemmata sp. SH-PL17
MGDPTFMNNVPDKLLSGKDLPTFKFELEKSKGKVIGGSSGKEATVVQLPISKGIAGVSMVLEPGAMRELHWHATAAEWGFVLWGHVRTTVIDPQGLAETNDFGPGDVWYFPRGHGHMLECLGDKPAHFILIFDNGYFSEFGTFSITDWIGHTPKALLAKNFKLPESAFDGFPKKEVYFARGAVPPATPAAPLQGLKLPPLTHKYELLEQEPHKVFKGGREWRVDSTRFPISKTVTGVVLDLEPGALRELHWHPNADEWQYVIDGNISVTMFGSHGRVRTEQMEKGDVGYIPQGYGHSIENVGDRPCRVLIGFNTGNYQAIDLSQWIAGNPADVLATNFSKPTSLFEKFPKQDVFIAPGK

SEQ ID NO: 1373 - DNA, 1077 bp, synthetic construct
  misc_feature 1..1077: note = Variant of oxalate decarboxylase from Gemmata sp. SH-PL17
  source 1..1077: mol_type = other DNA
atgggtgaccctacctttatgaacaatgtaccagaccctctgctgtcgggcaaagatttgccgacgttcaagtttgagctggaaaagagcaagggcaaagtcattggggggagttcgggaaaagaagcaaccgttgtccagttacctatctccaaaggcattgctggtgtgagcatgaagcttgaaccgggtgcgatgcgcgaattgcactggcatgccacagcagcagagtgggggttcgtattatggggccacgtccgtacgacggtgatcgatccacaaggtctggccgaaaccaacgactttggaccgggcgacgtgtggtattttcctcgcggtcatgggcacatgctggaatgcctgggcgataaaccggcgcatttcattctgatcttcgataacggctacttctcagagtttggcaccttctctattactgactggatcggtcacacaccgaaagcgcttctcgccaagaactttaagctgcccgaaagcgcttttgatgggtttcccaaaaaagaggtctattttgcacgtggcgcggttccaccagccacccctgcagcgcctttacagggactgaagctgccaccactcacgcataaatacgaactcctcgaacaagaacctcataaagtttttaaaggtggtcgtgaatggcgcgtggatagcactcgttttcccatttccaagactgtaaccggcgttgttcttgatttggaacccggcgcgttacgcgagcttcactggcatcctaatgctgacgagtggcaatatgtgatcgatggcaacattagtgtgacgatgttcggttctcatggccgtgtacgcaccgaacagatggagaagggtgatgtcgggtatattccacaggggtatggccacagcatcgaaaatgttggagatcgtccttgtcgcgtcttgattggctttaacacaggtaactaccaagcgatcgacttatcacagtggattgcaggtaatcccgcggatgttcttgccacgaacttctccaaacccaccagcctctttgaaaagttcccaaaacaggacgtgtttattgctcctggcaag

SEQ ID NO: 1374 - protein, 359 aa, synthetic construct
  REGION 1..359: note = Variant of oxalate decarboxylase from Gemmata sp. SH-PL17
MGDPTFMNNVPDPLLSGKDLPTFKFELEKSKGKVIGGSSGKEATVVQLPISKGIAGVSMKLEPGAMRELHWHATAAEWGFVLWGHVRTTVIDPQGLAETNDFGPGDVWYFPRGHGHMLECLGDKPAHFILIFDNGYFSEFGTFSITDWIGHTPKALLAKNFKLPESAFDGFPKKEVYFARGAVPPATPAAPLQGLKLPPLTHKYELLEQEPHKVFKGGREWRVDSTRFPISKTVTGVVLDLEPGALRELHWHPNADEWQYVIDGNISVTMFGSHGRVRTEQMEKGDVGYIPQGYGHSIENVGDRPCRVLIGFNTGNYQAIDLSQWIAGNPADVLATNFSKPTSLFEKFPKQDVFIAPGK

SEQ ID NO: 1375 - DNA, 1077 bp, synthetic construct
  misc_feature 1..1077: note = Variant of oxalate decarboxylase from Gemmata sp. SH-PL17
  source 1..1077: mol_type = other DNA
atgggtgaccctacctttatgaacaatgtaccagaccctctgctgtcgggcaaagatttgccgacgttcaagtttgagctggaaaagagcaagggcaaagtcattgggaatagttcgggaaaagaagcaaccgttgtccagttacctatctccaaaggcattgctggtgtgagcatggtacttgaaccgggtgcgatgcgcgaattgcactggcatgccacagcagcagagtgggggttcgtattatggggccacgtccgtacgacggtgatcgatccacaaggtctggccgaaaccaacgactttggaccgggcgacgtgtggtattttcctcgcggtcatgggcacatgctggaatgcctgggcgataaaccggcgcatttcattctgatcttcgataacggctacttctcagagtttggcaccttctctattactgactggatcggtcacacaccgaaagcgcttctcgccaagaactttaagctgcccgaaagcgcttttgatgggtttcccaaaaaagaggtctattttgcacgtggcgcggttccaccagccacccctgcagcgcctttacagggactgaagctgccaccactcacgcataaatacgaactcctcgaacaagaacctcataaagtttttaaaggtggtcgtgaatggcgcgtggatagcactcgttttcccatttccaagactgtaaccggcgttgttcttgatttggaacccggcgcgttacgcgagcttcactggcatcctaatgctgacgagtggcaatatgtgatcgatggcaacattagtgtgacgatgttcggttctcatggccgtgtacgcaccgaacagatggagaagggtgatgtcgggtatattccacaggggtatggccacagcatcgaaaatgttggagatcgtccttgtcgcgtcttgattggctttaacacaggtaactaccaagcgatcgacttatcacagtggattgcaggtaatcccgcggatgttcttgccacgaacttctccaaacccaccagcctctttgaaaagttcccaaaacaggacgtgtttattgctcctggcaag

SEQ ID NO: 1376 - protein, 359 aa, synthetic construct
  REGION 1..359: note = Variant of oxalate decarboxylase from Gemmata sp. SH-PL17
MGDPTFMNNVPDPLLSGKDLPTFKFELEKSKGKVIGNSSGKEATVVQLPISKGIAGVSMVLEPGAMRELHWHATAAEWGFVLWGHVRTTVIDPQGLAETNDFGPGDVWYFPRGHGHMLECLGDKPAHFILIFDNGYFSEFGTFSITDWIGHTPKALLAKNFKLPESAFDGFPKKEVYFARGAVPPATPAAPLQGLKLPPLTHKYELLEQEPHKVFKGGREWRVDSTRFPISKTVTGVVLDLEPGALRELHWHPNADEWQYVIDGNISVTMFGSHGRVRTEQMEKGDVGYIPQGYGHSIENVGDRPCRVLIGFNTGNYQAIDLSQWIAGNPADVLATNFSKPTSLFEKFPKQDVFIAPGK

SEQ ID NO: 1377 - DNA, 1077 bp, synthetic construct
  misc_feature 1..1077: note = Variant of oxalate decarboxylase from Gemmata sp. SH-PL17
  source 1..1077: mol_type = other DNA
atgggtgaccctacctttatgaacaatgtaccagaccctctgctgtcgggcaaagatttgccgacgttcaagtttgagctggaaaagagcaagggcaaagtcattggggggagttcgggaaaagaagcaaccgttgtccagttacctatctccaaaggcattgctggtgtgagcatgattcttgaaccgggtgcgatgcgcgaattgcactggcatgccacagcagcagagtgggggttcgtattatggggccacgtccgtacgacggtgatcgatccacaaggtctggccgaaaccaacgactttggaccgggcgacgtgtggtattttcctcgcggtcatgggcacatgctggaatgcctgggcgataaaccggcgcatttcattctgatcttcgataacggctacttctcagagtttggcaccttctctattactgactggatcggtcacacaccgaaagcgcttctcgccaagaactttaagctgcccgaaagcgcttttgatgggtttcccaaaaaagaggtctattttgcacgtggcgcggttccaccagccacccctgcagcgcctttacagggactgaagctgccaccactcacgcataaatacgaactcctcgaacaagaacctcataaagtttttaaaggtggtcgtgaatggcgcgtggatagcactcgttttcccatttccaagactgtaaccggcgttgttcttgatttggaacccggcgcgttacgcgagcttcactggcatcctaatgctgacgagtggcaatatgtgatcgatggcaacattagtgtgacgatgttcggttctcatggccgtgtacgcaccgaacagatggagaagggtgatgtcgggtatattccacaggggtatggccacagcatcgaaaatgttggagatcgtccttgtcgcgtcttgattggctttaacacaggtaactaccaagcgatcgacttatcacagtggattgcaggtaatcccgcggatgttcttgccacgaacttctccaaacccaccagcctctttgaaaagttcccaaaacaggacgtgtttattgctcctggcaag

SEQ ID NO: 1378 - protein, 359 aa, synthetic construct
  REGION 1..359: note = Variant of oxalate decarboxylase from Gemmata sp. SH-PL17
MGDPTFMNNVPDPLLSGKDLPTFKFELEKSKGKVIGGSSGKEATVVQLPISKGIAGVSMILEPGAMRELHWHATAAEWGFVLWGHVRTTVIDPQGLAETNDFGPGDVWYFPRGHGHMLECLGDKPAHFILIFDNGYFSEFGTFSITDWIGHTPKALLAKNFKLPESAFDGFPKKEVYFARGAVPPATPAAPLQGLKLPPLTHKYELLEQEPHKVFKGGREWRVDSTRFPISKTVTGVVLDLEPGALRELHWHPNADEWQYVIDGNISVTMFGSHGRVRTEQMEKGDVGYIPQGYGHSIENVGDRPCRVLIGFNTGNYQAIDLSQWIAGNPADVLATNFSKPTSLFEKFPKQDVFIAPGK

SEQ ID NO: 1379 - DNA, 1077 bp, synthetic construct
  misc_feature 1..1077: note = Variant of oxalate decarboxylase from Gemmata sp. SH-PL17
  source 1..1077: mol_type = other DNA
atgggtgaccctacctttatgaacaatgtaccagaccctctgctgtcgggcaaagatttgccgacgttcaagtttgagctggaaaagagcaagggcaaagtcattggggggagttcgggaaaagaagcaaccgttgtccagttacctatctccaaaggcattgctggtgtgagcatggtacttgaaccgggtgcgatgcgcgaattgcactggcatgccacagcagcagagtgggggttcgtattatggggccacgtccgtacgacggtgatcgatccacaaggtctggccgaaaccaacgactttggaccgggcgacgtgtggtattttcctcgcggtcatgggcacatgctggaatgcctgggcgataaaccggcgcatttcattctgatcttcgataacggctacttctcagagtttggcaccttctctattactgactggatcggtcacacaccgaaagcgcttctcgccaagaactttgatctgcccgaaagcgcttttgatgggtttcccaaaaaagaggtctattttgcacgtggcgcggttccaccagccacccctgcagcgcctttacagggactgaagctgccaccactcacgcataaatacgaactcctcgaacaagaacctcataaagtttttaaaggtggtcgtgaatggcgcgtggatagcactcgttttcccatttccaagactgtaaccggcgttgttcttgatttggaacccggcgcgttacgcgagcttcactggcatcctaatgctgacgagtggcaatatgtgatcgatggcaacattagtgtgacgatgttcggttctcatggccgtgtacgcaccgaacagatggagaagggtgatgtcgggtatattccacaggggtatggccacagcatcgaaaatgttggagatcgtccttgtcgcgtcttgattggctttaacacaggtaactaccaagcgatcgacttatcacagtggattgcaggtaatcccgcggatgttcttgccacgaacttctccaaacccaccagcctctttgaaaagttcccaaaacaggacgtgtttattgctcctggcaag

SEQ ID NO: 1380 - protein, 359 aa, synthetic construct
  REGION 1..359: note = Variant of oxalate decarboxylase from Gemmata sp. SH-PL17
MGDPTFMNNVPDPLLSGKDLPTFKFELEKSKGKVIGGSSGKEATVVQLPISKGIAGVSMVLEPGAMRELHWHATAAEWGFVLWGHVRTTVIDPQGLAETNDFGPGDVWYFPRGHGHMLECLGDKPAHFILIFDNGYFSEFGTFSITDWIGHTPKALLAKNFDLPESAFDGFPKKEVYFARGAVPPATPAAPLQGLKLPPLTHKYELLEQEPHKVFKGGREWRVDSTRFPISKTVTGVVLDLEPGALRELHWHPNADEWQYVIDGNISVTMFGSHGRVRTEQMEKGDVGYIPQGYGHSIENVGDRPCRVLIGFNTGNYQAIDLSQWIAGNPADVLATNFSKPTSLFEKFPKQDVFIAPGK

SEQ ID NO: 1381 - DNA, 1077 bp, synthetic construct
  misc_feature 1..1077: note = Variant of oxalate decarboxylase from Gemmata sp. SH-PL17
  source 1..1077: mol_type = other DNA
atgggtgaccctacctttatgaacaatgtaccagaccctctgctgtcgggcaaagatttgccgacgttcaagtttgagctggaaaagagcaagggcaaagtcattggggggagttcgggaaaagaagcaaccgttgtccagttacctatctccaaaggcattgctggtgtgagcatggtacttgaaccgggtgcgatgcgcgaattgcactggcatgccacagcagcagagtgggggttcgtattatggggccacgtccgtacgacggtgatcgatccacaaggtctggccgaaaccaacgactttggaccgggcgacgtgtggtattttcctcgcggtcatgggcacatgctggaatgcctgggcgataaaccggcgcatttcattctgatcttcgataacggctacttctcagagtttggcaccttctctattactgactggatcggtcacacaccgaaagcgcttctcgccaagaactttattctgcccgaaagcgcttttgatgggtttcccaaaaaagaggtctattttgcacgtggcgcggttccaccagccacccctgcagcgcctttacagggactgaagctgccaccactcacgcataaatacgaactcctcgaacaagaacctcataaagtttttaaaggtggtcgtgaatggcgcgtggatagcactcgttttcccatttccaagactgtaaccggcgttgttcttgatttggaacccggcgcgttacgcgagcttcactggcatcctaatgctgacgagtggcaatatgtgatcgatggcaacattagtgtgacgatgttcggttctcatggccgtgtacgcaccgaacagatggagaagggtgatgtcgggtatattccacaggggtatggccacagcatcgaaaatgttggagatcgtccttgtcgcgtcttgattggctttaacacaggtaactaccaagcgatcgacttatcacagtggattgcaggtaatcccgcggatgttcttgccacgaacttctccaaacccaccagcctctttgaaaagttcccaaaacaggacgtgtttattgctcctggcaag

SEQ ID NO: 1382 - protein, 359 aa, synthetic construct
  REGION 1..359: note = Variant of oxalate decarboxylase from Gemmata sp. SH-PL17
MGDPTFMNNVPDPLLSGKDLPTFKFELEKSKGKVIGGSSGKEATVVQLPISKGIAGVSMVLEPGAMRELHWHATAAEWGFVLWGHVRTTVIDPQGLAETNDFGPGDVWYFPRGHGHMLECLGDKPAHFILIFDNGYFSEFGTFSITDWIGHTPKALLAKNFILPESAFDGFPKKEVYFARGAVPPATPAAPLQGLKLPPLTHKYELLEQEPHKVFKGGREWRVDSTRFPISKTVTGVVLDLEPGALRELHWHPNADEWQYVIDGNISVTMFGSHGRVRTEQMEKGDVGYIPQGYGHSIENVGDRPCRVLIGFNTGNYQAIDLSQWIAGNPADVLATNFSKPTSLFEKFPKQDVFIAPGK

SEQ ID NO: 1383 - DNA, 1077 bp, synthetic construct
  misc_feature 1..1077: note = Variant of oxalate decarboxylase from Gemmata sp. SH-PL17
  source 1..1077: mol_type = other DNA
atgggtgaccctacctttatgaacaatgtaccagaccctctgctgtatggcaaagatttgccgacgttcaagtttgagctggaaaagagcaagggcaaagtcattggggggagttcgggaaaagaagcaaccgttgtccagttacctatctccaaaggcattgctggtgtgagcatggtacttgaaccgggtgcgatgcgcgaattgcactggcatgccacagcagcagagtgggggttcgtattatggggccacgtccgtacgacggtgatcgatccacaaggtctggccgaaaccaacgactttggaccgggcgacgtgtggtattttcctcgcggtcatgggcacatgctggaatgcctgggcgataaaccggcgcatttcattctgatcttcgataacggctacttctcagagtttggcaccttctctattactgactggatcggtcacacaccgaaagcgcttctcgccaagaactttaagctgcccgaaagcgcttttgatgggtttcccaaaaaagaggtctattttgcacgtggcgcggttccaccagccacccctgcagcgcctttacagggactgaagctgccaccactcacgcataaatacgaactcctcgaacaagaacctcataaagtttttaaaggtggtcgtgaatggcgcgtggatagcactcgttttcccatttccaagactgtaaccggcgttgttcttgatttggaacccggcgcgttacgcgagcttcactggcatcctaatgctgacgagtggcaatatgtgatcgatggcaacattagtgtgacgatgttcggttctcatggccgtgtacgcaccgaacagatggagaagggtgatgtcgggtatattccacaggggtatggccacagcatcgaaaatgttggagatcgtccttgtcgcgtcttgattggctttaacacaggtaactaccaagcgatcgacttatcacagtggattgcaggtaatcccgcggatgttcttgccacgaacttctccaaacccaccagcctctttgaaaagttcccaaaacaggacgtgtttattgctcctggcaag

SEQ ID NO: 1384 - protein, 359 aa, synthetic construct
  REGION 1..359: note = Variant of oxalate decarboxylase from Gemmata sp. SH-PL17
MGDPTFMNNVPDPLLYGKDLPTFKFELEKSKGKVIGGSSGKEATVVQLPISKGIAGVSMVLEPGAMRELHWHATAAEWGFVLWGHVRTTVIDPQGLAETNDFGPGDVWYFPRGHGHMLECLGDKPAHFILIFDNGYFSEFGTFSITDWIGHTPKALLAKNFKLPESAFDGFPKKEVYFARGAVPPATPAAPLQGLKLPPLTHKYELLEQEPHKVFKGGREWRVDSTRFPISKTVTGVVLDLEPGALRELHWHPNADEWQYVIDGNISVTMFGSHGRVRTEQMEKGDVGYIPQGYGHSIENVGDRPCRVLIGFNTGNYQAIDLSQWIAGNPADVLATNFSKPTSLFEKFPKQDVFIAPGK

SEQ ID NO: 1385 - DNA, 1077 bp, synthetic construct
  misc_feature 1..1077: note = Variant of oxalate decarboxylase from Gemmata sp. SH-PL17
  source 1..1077: mol_type = other DNA
atgggtgaccctacctttatgaacaatgtaccagaccctctgctgtcgggcaaagatttgccgacgttcaagtttgagctggaaaagagcaagggcaaagtcattggggggagttcgggaaaagaagcaaccgttgtccagttacctatctccaaaggcattgctggtgtgagcatggtacttgaaccgggtgcgatgcgcgaattgcactggcatgccacagcagcagagtgggggttcgtattatggggccacgtccgtacgacggtgatcgatccacaaggtctggccgaaaccaacgactttggaccgggcgacgtgtggtattttcctcgcggtcatgggcacatgctggaatgcctgggcgataaaccggcgcatttcattctgatcttcgataacggctacttctcagagtttggcaccttctctattactgactggatcggtcacacaccgaaagcgcttctcgccaagaacttttctctgcccgaaagcgcttttgatgggtttcccaaaaaagaggtctattttgcacgtggcgcggttccaccagccacccctgcagcgcctttacagggactgaagctgccaccactcacgcataaatacgaactcctcgaacaagaacctcataaagtttttaaaggtggtcgtgaatggcgcgtggatagcactcgttttcccatttccaagactgtaaccggcgttgttcttgatttggaacccggcgcgttacgcgagcttcactggcatcctaatgctgacgagtggcaatatgtgatcgatggcaacattagtgtgacgatgttcggttctcatggccgtgtacgcaccgaacagatggagaagggtgatgtcgggtatattccacaggggtatggccacagcatcgaaaatgttggagatcgtccttgtcgcgtcttgattggctttaacacaggtaactaccaagcgatcgacttatcacagtggattgcaggtaatcccgcggatgttcttgccacgaacttctccaaacccaccagcctctttgaaaagttcccaaaacaggacgtgtttattgctcctggcaag

SEQ ID NO: 1386 - protein, 359 aa, synthetic construct
  REGION 1..359: note = Variant of oxalate decarboxylase from Gemmata sp. SH-PL17
MGDPTFMNNVPDPLLSGKDLPTFKFELEKSKGKVIGGSSGKEATVVQLPISKGIAGVSMVLEPGAMRELHWHATAAEWGFVLWGHVRTTVIDPQGLAETNDFGPGDVWYFPRGHGHMLECLGDKPAHFILIFDNGYFSEFGTFSITDWIGHTPKALLAKNFSLPESAFDGFPKKEVYFARGAVPPATPAAPLQGLKLPPLTHKYELLEQEPHKVFKGGREWRVDSTRFPISKTVTGVVLDLEPGALRELHWHPNADEWQYVIDGNISVTMFGSHGRVRTEQMEKGDVGYIPQGYGHSIENVGDRPCRVLIGFNTGNYQAIDLSQWIAGNPADVLATNFSKPTSLFEKFPKQDVFIAPGK

SEQ ID NO: 1387 - DNA, 1077 bp, synthetic construct
  misc_feature 1..1077: note = Variant of oxalate decarboxylase from Gemmata sp. SH-PL17
  source 1..1077: mol_type = other DNA
atgggtgaccctacctttatgaacaatgtaccagaccctctgctgtcgggcaaagatttgccgacgttcaagtttgagctggaaaagagcaagggcaaagtcattggggggagttcgggaaaagaagcaaccgttgtccagttacctatctccaaaggcattgctggtgtgagcatggtacttgaaccgggtgcgatgcgcgaattgcactggcatgccacagcagcagagtgggggttcgtattatggggccacgtccgtacgacggtgatcgatccacaaggttgtgccgaaaccaacgactttggaccgggcgacgtgtggtattttcctcgcggtcatgggcacatgctggaatgcctgggcgataaaccggcgcatttcattctgatcttcgataacggctacttctcagagtttggcaccttctctattactgactggatcggtcacacaccgaaagcgcttctcgccaagaactttaagctgcccgaaagcgcttttgatgggtttcccaaaaaagaggtctattttgcacgtggcgcggttccaccagccacccctgcagcgcctttacagggactgaagctgccaccactcacgcataaatacgaactcctcgaacaagaacctcataaagtttttaaaggtggtcgtgaatggcgcgtggatagcactcgttttcccatttccaagactgtaaccggcgttgttcttgatttggaacccggcgcgttacgcgagcttcactggcatcctaatgctgacgagtggcaatatgtgatcgatggcaacattagtgtgacgatgttcggttctcatggccgtgtacgcaccgaacagatggagaagggtgatgtcgggtatattccacaggggtatggccacagcatcgaaaatgttggagatcgtccttgtcgcgtcttgattggctttaacacaggtaactaccaagcgatcgacttatcacagtggattgcaggtaatcccgcggatgttcttgccacgaacttctccaaacccaccagcctctttgaaaagttcccaaaacaggacgtgtttattgctcctggcaag

SEQ ID NO: 1388 - protein, 359 aa, synthetic construct
  REGION 1..359: note = Variant of oxalate decarboxylase from Gemmata sp. SH-PL17
MGDPTFMNNVPDPLLSGKDLPTFKFELEKSKGKVIGGSSGKEATVVQLPISKGIAGVSMVLEPGAMRELHWHATAAEWGFVLWGHVRTTVIDPQGCAETNDFGPGDVWYFPRGHGHMLECLGDKPAHFILIFDNGYFSEFGTFSITDWIGHTPKALLAKNFKLPESAFDGFPKKEVYFARGAVPPATPAAPLQGLKLPPLTHKYELLEQEPHKVFKGGREWRVDSTRFPISKTVTGVVLDLEPGALRELHWHPNADEWQYVIDGNISVTMFGSHGRVRTEQMEKGDVGYIPQGYGHSIENVGDRPCRVLIGFNTGNYQAIDLSQWIAGNPADVLATNFSKPTSLFEKFPKQDVFIAPGK

SEQ ID NO: 1389 - DNA, 1077 bp, synthetic construct
  misc_feature 1..1077: note = Variant of oxalate decarboxylase from Gemmata sp. SH-PL17
  source 1..1077: mol_type = other DNA
atgggtgaccctacctttatgaacaatgtaccagaccctctgctgtcgggcaaagatttgccgacgttcaagtttgagctggaaaagagcaagggcaaagtcattggggggagttcgggaaaagaagcaaccgttgtccagttacctatctccaaaggcattgctggtgtgagcatggtacttgaaccgggtgcgatgcgcgaattgcactggcatgccacagcagcagagtgggggttcgtattatggggccacgtccgtacgacggtgatcgatccacaaggtctggccgaaaccaacgactttggaccgggcgacgtgtggtattttcctcgcggtcatgggcacatgctggaatgcctgggcgataaaccggcgcatttcattctgatcttcgataacggctacttctcagagtttggcaccttctctattactgactggatcggtcacacaccgaaagcgcttctcgccaagaactttaagctgcccgaaagcgcttttgatgggtttcccaaaaaagaggtctattttgcacgtggcgcggttccaccagccacccctgcagcgcctttacagggactgaagctgccaccactcacgcataaatacgaactcctcgaacaaaagcctcataaagtttttaaaggtggtcgtgaatggcgcgtggatagcactcgttttcccatttccaagactgtaaccggcgttgttcttgatttggaacccggcgcgttacgcgagcttcactggcatcctaatgctgacgagtggcaatatgtgatcgatggcaacattagtgtgacgatgttcggttctcatggccgtgtacgcaccgaacagatggagaagggtgatgtcgggtatattccacaggggtatggccacagcatcgaaaatgttggagatcgtccttgtcgcgtcttgattggctttaacacaggtaactaccaagcgatcgacttatcacagtggattgcaggtaatcccgcggatgttcttgccacgaacttctccaaacccaccagcctctttgaaaagttcccaaaacaggacgtgtttattgctcctggcaag

SEQ ID NO: 1390 - protein, 359 aa, synthetic construct
  REGION 1..359: note = Variant of oxalate decarboxylase from Gemmata sp. SH-PL17
MGDPTFMNNVPDPLLSGKDLPTFKFELEKSKGKVIGGSSGKEATVVQLPISKGIAGVSMVLEPGAMRELHWHATAAEWGFVLWGHVRTTVIDPQGLAETNDFGPGDVWYFPRGHGHMLECLGDKPAHFILIFDNGYFSEFGTFSITDWIGHTPKALLAKNFKLPESAFDGFPKKEVYFARGAVPPATPAAPLQGLKLPPLTHKYELLEQKPHKVFKGGREWRVDSTRFPISKTVTGVVLDLEPGALRELHWHPNADEWQYVIDGNISVTMFGSHGRVRTEQMEKGDVGYIPQGYGHSIENVGDRPCRVLIGFNTGNYQAIDLSQWIAGNPADVLATNFSKPTSLFEKFPKQDVFIAPGK

SEQ ID NO: 1391 - DNA, 1077 bp, synthetic construct
  misc_feature 1..1077: note = Variant of oxalate decarboxylase from Gemmata sp. SH-PL17
  source 1..1077: mol_type = other DNA
atgggtgaccctacctttatgaacaatgtaccagaccctctgctgtcgggcaaagatttgccgacgttcaagtttgagctggaaaagagcaagggcaaagtcattggggggagttcgggaaaagaagcaaccgttgtccagttacctatctccaaaggcattgctggtgtgagcatggtacttgaaccgggtgcgatgcgcgaattgcactggcatgccacagcagcagagtgggggttcgtattatggggccacgtccgtacgacggtgatcgatccacaaggtctggccgaaaccaacgactttggaccgggcgacgtgtggtattttcctcgcggtcatgggcacatgctggaatgcctgggcgataaaccggcgcatttcattctgatcttcgataacggctacttctcagagtttggcaccttctctattactgactggatcggtcacacaccgaaagcgcttctcgccaagaactttaagctgcccgaaagcgcttttgatgggtttcccaaaattgaggtctattttgcacgtggcgcggttccaccagccacccctgcagcgcctttacagggactgaagctgccaccactcacgcataaatacgaactcctcgaacaagaacctcataaagtttttaaaggtggtcgtgaatggcgcgtggatagcactcgttttcccatttccaagactgtaaccggcgttgttcttgatttggaacccggcgcgttacgcgagcttcactggcatcctaatgctgacgagtggcaatatgtgatcgatggcaacattagtgtgacgatgttcggttctcatggccgtgtacgcaccgaacagatggagaagggtgatgtcgggtatattccacaggggtatggccacagcatcgaaaatgttggagatcgtccttgtcgcgtcttgattggctttaacacaggtaactaccaagcgatcgacttatcacagtggattgcaggtaatcccgcggatgttcttgccacgaacttctccaaacccaccagcctctttgaaaagttcccaaaacaggacgtgtttattgctcctggcaag

SEQ ID NO: 1392 - protein, 359 aa, synthetic construct
  REGION 1..359: note = Variant of oxalate decarboxylase from Gemmata sp. SH-PL17
MGDPTFMNNVPDPLLSGKDLPTFKFELEKSKGKVIGGSSGKEATVVQLPISKGIAGVSMVLEPGAMRELHWHATAAEWGFVLWGHVRTTVIDPQGLAETNDFGPGDVWYFPRGHGHMLECLGDKPAHFILIFDNGYFSEFGTFSITDWIGHTPKALLAKNFKLPESAFDGFPKIEVYFARGAVPPATPAAPLQGLKLPPLTHKYELLEQEPHKVFKGGREWRVDSTRFPISKTVTGVVLDLEPGALRELHWHPNADEWQYVIDGNISVTMFGSHGRVRTEQMEKGDVGYIPQGYGHSIENVGDRPCRVLIGFNTGNYQAIDLSQWIAGNPADVLATNFSKPTSLFEKFPKQDVFIAPGK

SEQ ID NO: 1393 - DNA, 1077 bp, synthetic construct
  misc_feature 1..1077: note = Variant of oxalate decarboxylase from Gemmata sp. SH-PL17
  source 1..1077: mol_type = other DNA
atgggtgaccctacctttatgaacaatgtaccagaccctctgctgtcgggcaaagatttgccgacgttcaagtttgagctggaaaagagcaagggcaaagtcattggggggagttcgggaaaagaagcaaccgttgtccagttacctatctccaaaggcattgctggtgtgagcatggtacttgaaccgggtgcgatgcgcgaattgcactggcatgccacagcagcagagtgggggttcgtattatggggccacgtccgtacgacggtgatcgatccacaaggtctggccgaaaccaacgactttggaccgggcgacgtgtggtattttcctcgcggtcatgggcacatgctggaatgcctgggcgataaaccggcgcatttcattctgatcttcgataacggctacttctcagagtttggcaccttctctattactgactggatcggtcacacaccgaaagcgcttctcgccaagaactttaagctgcccgaaagcgcttttgatgggtttcccaaaaaagaggtctattttgcacgtggcgcggttccaccagccacccctgcagcgcctttacagggactgaagctgccaccactcacgcataaatacgaactcctcgaacaattgcctcataaagtttttaaaggtggtcgtgaatggcgcgtggatagcactcgttttcccatttccaagactgtaaccggcgttgttcttgatttggaacccggcgcgttacgcgagcttcactggcatcctaatgctgacgagtggcaatatgtgatcgatggcaacattagtgtgacgatgttcggttctcatggccgtgtacgcaccgaacagatggagaagggtgatgtcgggtatattccacaggggtatggccacagcatcgaaaatgttggagatcgtccttgtcgcgtcttgattggctttaacacaggtaactaccaagcgatcgacttatcacagtggattgcaggtaatcccgcggatgttcttgccacgaacttctccaaacccaccagcctctttgaaaagttcccaaaacaggacgtgtttattgctcctggcaag

SEQ ID NO: 1394 - protein, 359 aa, synthetic construct
  REGION 1..359: note = Variant of oxalate decarboxylase from Gemmata sp. SH-PL17
MGDPTFMNNVPDPLLSGKDLPTFKFELEKSKGKVIGGSSGKEATVVQLPISKGIAGVSMVLEPGAMRELHWHATAAEWGFVLWGHVRTTVIDPQGLAETNDFGPGDVWYFPRGHGHMLECLGDKPAHFILIFDNGYFSEFGTFSITDWIGHTPKALLAKNFKLPESAFDGFPKKEVYFARGAVPPATPAAPLQGLKLPPLTHKYELLEQLPHKVFKGGREWRVDSTRFPISKTVTGVVLDLEPGALRELHWHPNADEWQYVIDGNISVTMFGSHGRVRTEQMEKGDVGYIPQGYGHSIENVGDRPCRVLIGFNTGNYQAIDLSQWIAGNPADVLATNFSKPTSLFEKFPKQDVFIAPGK

SEQ ID NO: 1395 - DNA, 1077 bp, synthetic construct
  misc_feature 1..1077: note = Variant of oxalate decarboxylase from Gemmata sp. SH-PL17
  source 1..1077: mol_type = other DNA
atgggtgaccctacctttatgaacaatgtaccagaccctctgctgtcgggcaaagatttgccgacgttcaagtttgatctggaaaagagcaagggcaaagtcattggggggagttcgggaaaagaagcaaccgttgtccagttacctatctccaaaggcattgctggtgtgagcatggtacttgaaccgggtgcgatgcgcgaattgcactggcatgccacagcagcagagtgggggttcgtattatggggccacgtccgtacgacggtgatcgatccacaaggtctggccgaaaccaacgactttggaccgggcgacgtgtggtattttcctcgcggtcatgggcacatgctggaatgcctgggcgataaaccggcgcatttcattctgatcttcgataacggctacttctcagagtttggcaccttctctattactgactggatcggtcacacaccgaaagcgcttctcgccaagaactttaagctgcccgaaagcgcttttgatgggtttcccaaaaaagaggtctattttgcacgtggcgcggttccaccagccacccctgcagcgcctttacagggactgaagctgccaccactcacgcataaatacgaactcctcgaacaagaacctcataaagtttttaaaggtggtcgtgaatggcgcgtggatagcactcgttttcccatttccaagactgtaaccggcgttgttcttgatttggaacccggcgcgttacgcgagcttcactggcatcctaatgctgacgagtggcaatatgtgatcgatggcaacattagtgtgacgatgttcggttctcatggccgtgtacgcaccgaacagatggagaagggtgatgtcgggtatattccacaggggtatggccacagcatcgaaaatgttggagatcgtccttgtcgcgtcttgattggctttaacacaggtaactaccaagcgatcgacttatcacagtggattgcaggtaatcccgcggatgttcttgccacgaacttctccaaacccaccagcctctttgaaaagttcccaaaacaggacgtgtttattgctcctggcaag

SEQ ID NO: 1396 - protein, 359 aa, synthetic construct
  REGION 1..359: note = Variant of oxalate decarboxylase from Gemmata sp. SH-PL17
MGDPTFMNNVPDPLLSGKDLPTFKFDLEKSKGKVIGGSSGKEATVVQLPISKGIAGVSMVLEPGAMRELHWHATAAEWGFVLWGHVRTTVIDPQGLAETNDFGPGDVWYFPRGHGHMLECLGDKPAHFILIFDNGYFSEFGTFSITDWIGHTPKALLAKNFKLPESAFDGFPKKEVYFARGAVPPATPAAPLQGLKLPPLTHKYELLEQEPHKVFKGGREWRVDSTRFPISKTVTGVVLDLEPGALRELHWHPNADEWQYVIDGNISVTMFGSHGRVRTEQMEKGDVGYIPQGYGHSIENVGDRPCRVLIGFNTGNYQAIDLSQWIAGNPADVLATNFSKPTSLFEKFPKQDVFIAPGK

SEQ ID NO: 1397 - DNA, 1077 bp, synthetic construct
  misc_feature 1..1077: note = Variant of oxalate decarboxylase from Gemmata sp. SH-PL17
  source 1..1077: mol_type = other DNA
atgggtgaccctacctttatgaacaatgtaccagaccctctgctgtcgggcaaagatttgccgacgttcaagtttaatctggaaaagagcaagggcaaagtcattggggggagttcgggaaaagaagcaaccgttgtccagttacctatctccaaaggcattgctggtgtgagcatggtacttgaaccgggtgcgatgcgcgaattgcactggcatgccacagcagcagagtgggggttcgtattatggggccacgtccgtacgacggtgatcgatccacaaggtctggccgaaaccaacgactttggaccgggcgacgtgtggtattttcctcgcggtcatgggcacatgctggaatgcctgggcgataaaccggcgcatttcattctgatcttcgataacggctacttctcagagtttggcaccttctctattactgactggatcggtcacacaccgaaagcgcttctcgccaagaactttaagctgcccgaaagcgcttttgatgggtttcccaaaaaagaggtctattttgcacgtggcgcggttccaccagccacccctgcagcgcctttacagggactgaagctgccaccactcacgcataaatacgaactcctcgaacaagaacctcataaagtttttaaaggtggtcgtgaatggcgcgtggatagcactcgttttcccatttccaagactgtaaccggcgttgttcttgatttggaacccggcgcgttacgcgagcttcactggcatcctaatgctgacgagtggcaatatgtgatcgatggcaacattagtgtgacgatgttcggttctcatggccgtgtacgcaccgaacagatggagaagggtgatgtcgggtatattccacaggggtatggccacagcatcgaaaatgttggagatcgtccttgtcgcgtcttgattggctttaacacaggtaactaccaagcgatcgacttatcacagtggattgcaggtaatcccgcggatgttcttgccacgaacttctccaaacccaccagcctctttgaaaagttcccaaaacaggacgtgtttattgctcctggcaag

SEQ ID NO: 1398 - protein, 359 aa, synthetic construct
  REGION 1..359: note = Variant of oxalate decarboxylase from Gemmata sp. SH-PL17
MGDPTFMNNVPDPLLSGKDLPTFKFNLEKSKGKVIGGSSGKEATVVQLPISKGIAGVSMVLEPGAMRELHWHATAAEWGFVLWGHVRTTVIDPQGLAETNDFGPGDVWYFPRGHGHMLECLGDKPAHFILIFDNGYFSEFGTFSITDWIGHTPKALLAKNFKLPESAFDGFPKKEVYFARGAVPPATPAAPLQGLKLPPLTHKYELLEQEPHKVFKGGREWRVDSTRFPISKTVTGVVLDLEPGALRELHWHPNADEWQYVIDGNISVTMFGSHGRVRTEQMEKGDVGYIPQGYGHSIENVGDRPCRVLIGFNTGNYQAIDLSQWIAGNPADVLATNFSKPTSLFEKFPKQDVFIAPGK

SEQ ID NO: 1399 - DNA, 1077 bp, synthetic construct
  misc_feature 1..1077: note = Variant of oxalate decarboxylase from Gemmata sp. SH-PL17
  source 1..1077: mol_type = other DNA
atgggtgaccctacctttatgaacaatgtaccagaccctctgctgtcgggcaaagatttgccgacgttcaagtttgagctggaaaagagcaagggcaaagtcattggggggagttcgggaaaagaagcaaccgttgtccagttacctatctccaaaggcattgctggtgtgagcatggtacttgaaccgggtgcgatgcgcgaattgcactggcatgccacagcagcagagtgggggttcgtattatggggccacgtccgtacgacggtgatcgatccacaaggtctggccgaaaccaacgactttggaccgggcgacgtgtggtattttcctcgcggtcatgggcacatgctggaatgcctgggcgataaaccggcgcatttcattctgatcttcgataacggctacttctcagagtttggcaccttctctattactgactggatcggtcacacaccgaaagcgcttctcgccaagaactttaagctgcccgaaagcgcttttgatgggtttcccaaaaaagaggtctattttgcacgtggcgcggttccaccagccacccctgcagcgcctttacagggactgaagctgccaccactcacgcataaatacgaactcctcgaacaagatcctcataaagtttttaaaggtggtcgtgaatggcgcgtggatagcactcgttttcccatttccaagactgtaaccggcgttgttcttgatttggaacccggcgcgttacgcgagcttcactggcatcctaatgctgacgagtggcaatatgtgatcgatggcaacattagtgtgacgatgttcggttctcatggccgtgtacgcaccgaacagatggagaagggtgatgtcgggtatattccacaggggtatggccacagcatcgaaaatgttggagatcgtccttgtcgcgtcttgattggctttaacacaggtaactaccaagcgatcgacttatcacagtggattgcaggtaatcccgcggatgttcttgccacgaacttctccaaacccaccagcctctttgaaaagttcccaaaacaggacgtgtttattgctcctggcaag

SEQ ID NO: 1400 - protein, 359 aa, synthetic construct
  REGION 1..359: note = Variant of oxalate decarboxylase from Gemmata sp. SH-PL17
MGDPTFMNNVPDPLLSGKDLPTFKFELEKSKGKVIGGSSGKEATVVQLPISKGIAGVSMVLEPGAMRELHWHATAAEWGFVLWGHVRTTVIDPQGLAETNDFGPGDVWYFPRGHGHMLECLGDKPAHFILIFDNGYFSEFGTFSITDWIGHTPKALLAKNFKLPESAFDGFPKKEVYFARGAVPPATPAAPLQGLKLPPLTHKYELLEQDPHKVFKGGREWRVDSTRFPISKTVTGVVLDLEPGALRELHWHPNADEWQYVIDGNISVTMFGSHGRVRTEQMEKGDVGYIPQGYGHSIENVGDRPCRVLIGFNTGNYQAIDLSQWIAGNPADVLATNFSKPTSLFEKFPKQDVFIAPGK

SEQ ID NO: 1401 - DNA, 1077 bp, synthetic construct
  misc_feature 1..1077: note = Variant of oxalate decarboxylase from Gemmata sp. SH-PL17
  source 1..1077: mol_type = other DNA
atgggtgaccctacctttatgaacaatgtaccagactttctgctgtcgggcaaagatttgccgacgttcaagtttgagctggaaaagagcaagggcaaagtcattggggggagttcgggaaaagaagcaaccgttgtccagttacctatctccaaaggcattgctggtgtgagcatggtacttgaaccgggtgcgatgcgcgaattgcactggcatgccacagcagcagagtgggggttcgtattatggggccacgtccgtacgacggtgatcgatccacaaggtctggccgaaaccaacgactttggaccgggcgacgtgtggtattttcctcgcggtcatgggcacatgctggaatgcctgggcgataaaccggcgcatttcattctgatcttcgataacggctacttctcagagtttggcaccttctctattactgactggatcggtcacacaccgaaagcgcttctcgccaagaactttaagctgcccgaaagcgcttttgatgggtttcccaaaaaagaggtctattttgcacgtggcgcggttccaccagccacccctgcagcgcctttacagggactgaagctgccaccactcacgcataaatacgaactcctcgaacaagaacctcataaagtttttaaaggtggtcgtgaatggcgcgtggatagcactcgttttcccatttccaagactgtaaccggcgttgttcttgatttggaacccggcgcgttacgcgagcttcactggcatcctaatgctgacgagtggcaatatgtgatcgatggcaacattagtgtgacgatgttcggttctcatggccgtgtacgcaccgaacagatggagaagggtgatgtcgggtatattccacaggggtatggccacagcatcgaaaatgttggagatcgtccttgtcgcgtcttgattggctttaacacaggtaactaccaagcgatcgacttatcacagtggattgcaggtaatcccgcggatgttcttgccacgaacttctccaaacccaccagcctctttgaaaagttcccaaaacaggacgtgtttattgctcctggcaag

SEQ ID NO: 1402 - protein, 359 aa, synthetic construct
  REGION 1..359: note = Variant of oxalate decarboxylase from Gemmata sp. SH-PL17
MGDPTFMNNVPDFLLSGKDLPTFKFELEKSKGKVIGGSSGKEATVVQLPISKGIAGVSMVLEPGAMRELHWHATAAEWGFVLWGHVRTTVIDPQGLAETNDFGPGDVWYFPRGHGHMLECLGDKPAHFILIFDNGYFSEFGTFSITDWIGHTPKALLAKNFKLPESAFDGFPKKEVYFARGAVPPATPAAPLQGLKLPPLTHKYELLEQEPHKVFKGGREWRVDSTRFPISKTVTGVVLDLEPGALRELHWHPNADEWQYVIDGNISVTMFGSHGRVRTEQMEKGDVGYIPQGYGHSIENVGDRPCRVLIGFNTGNYQAIDLSQWIAGNPADVLATNFSKPTSLFEKFPKQDVFIAPGK

SEQ ID NO: 1403 - DNA, 1077 bp, synthetic construct
  misc_feature 1..1077: note = Variant of oxalate decarboxylase from Gemmata sp. SH-PL17
  source 1..1077: mol_type = other DNA
atgggtgaccctacctttatgaacaatgtaccagaccctctgctgtcgggcaaagatttgccgacgttcaagtttgagctggaaaagagcaagggcaaagtcattggggggagttcgggaaaagaagcaaccgttgtccagttacctatctccaaaggcattgctggtgtgagcatggtacttgaaccgggtgcgatgcgcgaattgcactggcatgccacagcagcagagtgggggttcgtattatggggccacgtccgtacgacggtgatcgatccacaaggtctggccgaaaccaacgactttggaccgggcgacgtgtggtattttcctcgcggtcatgggcacatgctggaatgcctgggcgataaaccggcgcatttcattctgatcttcgataacggctacttctcagagtttggcaccttctctattactgactggatcggtcacacaccgaaagcgcttctcgccaagaactttaagctgcccgaaagcgcttttgatgggtttcccaaaaaagaggtctattttgcacgtggcgcggttccaccagccacccctgcagcgcctttacagggactgaagctgccaccactcacgcataaatacgaactcctcgaacaagaacctcataaagtttttaaaggtggtcgtgaatggcgcgtggatagcactcgttttcccatttccaagactgtaaccggcgttgttcttgatttggaacccggcgcgttacgcgagcttcactggcatcctaatgctgacgagtggcaatatgtgatcgatggcaacattagtgtgacgatgttcggttctcatggccgtgtacgcaccgaacagatggagaagggtgatgtcgggtatattccacaggggtatggccacagcatcgaaaatgttggagatcgtccttgtcgcgtcttgattggctttaacacaggtaactacaatgcgatcgacttatcacagtggattgcaggtaatcccgcggatgttcttgccacgaacttctccaaacccaccagcctctttgaaaagttcccaaaacaggacgtgtttattgctcctggcaag

SEQ ID NO: 1404 - protein, 359 aa, synthetic construct
  REGION 1..359: note = Variant of oxalate decarboxylase from Gemmata sp. SH-PL17
MGDPTFMNNVPDPLLSGKDLPTFKFELEKSKGKVIGGSSGKEATVVQLPISKGIAGVSMVLEPGAMRELHWHATAAEWGFVLWGHVRTTVIDPQGLAETNDFGPGDVWYFPRGHGHMLECLGDKPAHFILIFDNGYFSEFGTFSITDWIGHTPKALLAKNFKLPESAFDGFPKKEVYFARGAVPPATPAAPLQGLKLPPLTHKYELLEQEPHKVFKGGREWRVDSTRFPISKTVTGVVLDLEPGALRELHWHPNADEWQYVIDGNISVTMFGSHGRVRTEQMEKGDVGYIPQGYGHSIENVGDRPCRVLIGFNTGNYNAIDLSQWIAGNPADVLATNFSKPTSLFEKFPKQDVFIAPGK

SEQ ID NO: 1405 - DNA, 1077 bp, synthetic construct
  misc_feature 1..1077: note = Variant of oxalate decarboxylase from Gemmata sp. SH-PL17
  source 1..1077: mol_type = other DNA
atgggtgaccctacctttatgaacaatgtaccagaccctctgctgtcgggcaaagatttgccgacgttcaagtttgagctggaaaagagcaagggcaaagtcattggggggagttcgggaaaagaagcaaccgttgtccagttacctatctccaaaggcattgctggtgtgagcatggtacttgaaccgggtgcgatgcgcgaattgcactggcatgccacagcagcagagtgggggttcgtattatggggccacgtccgtacgacggtgatcgatccacaaggtctggccgaaaccaacgactttggaccgggcgacgtgtggtattttcctcgcggtcatgggcacatgctggaatgcctgggcgataaaccggcgcatttcattctgatcttcgataacggctacttctcagagtttggcaccttctctattactgactggatcggtcacacaccgaaagcgcttctcgccaagaactttaagctgcccgaaagcgcttttgatgggtttcccaaaaaagaggtctattttgcacgtggcgcggttccaccagccacccctgcagcgcctttacagggactgaagctgccaccactcacgcataaatacgaactcctcgaacaagaacctcataaagtttttaaaggtggtcgtgaatggcgcgtggatagcactcgttttcccatttccaagactgtaaccggcgttgttcttgatttggaacccggcgcgttacgcgagcttcactggcatcctaatgctgacgagtggcaatatgtgatcgatggcaacattagtgtgacgatgttcggttctcatggccgttatcgcaccgaacagatggagaagggtgatgtcgggtatattccacaggggtatggccacagcatcgaaaatgttggagatcgtccttgtcgcgtcttgattggctttaacacaggtaactaccaagcgatcgacttatcacagtggattgcaggtaatcccgcggatgttcttgccacgaacttctccaaacccaccagcctctttgaaaagttcccaaaacaggacgtgtttattgctcctggcaag

SEQ ID NO: 1406 - protein, 359 aa, synthetic construct
  REGION 1..359: note = Variant of oxalate decarboxylase from Gemmata sp. SH-PL17
MGDPTFMNNVPDPLLSGKDLPTFKFELEKSKGKVIGGSSGKEATVVQLPISKGIAGVSMVLEPGAMRELHWHATAAEWGFVLWGHVRTTVIDPQGLAETNDFGPGDVWYFPRGHGHMLECLGDKPAHFILIFDNGYFSEFGTFSITDWIGHTPKALLAKNFKLPESAFDGFPKKEVYFARGAVPPATPAAPLQGLKLPPLTHKYELLEQEPHKVFKGGREWRVDSTRFPISKTVTGVVLDLEPGALRELHWHPNADEWQYVIDGNISVTMFGSHGRYRTEQMEKGDVGYIPQGYGHSIENVGDRPCRVLIGFNTGNYQAIDLSQWIAGNPADVLATNFSKPTSLFEKFPKQDVFIAPGK

SEQ ID NO: 1407 - DNA, 1077 bp, synthetic construct
  misc_feature 1..1077: note = Variant of oxalate decarboxylase from Gemmata sp. SH-PL17
  source 1..1077: mol_type = other DNA
atgggtgaccctacctttatgaacaatgtaccagaccctctgctgtcgggcaaagatttgccgacgttcaagtttgagctggaaaagagcaagggcaaagtcattggggggagttcgggaaaagaagcaaccgttgtccagttacctatctccaaaggcattgctggtgtgagcatggtacttgaaccgggtgcgatgcgcgaattgcactggcatgccacagcagcagagtgggggttcgtattatggggccacgtccgtacgacggtgatcgatccacaaggtctggccgaaaccaacgactttggaccgggcgacgtgtggtattttcctcgcggtcatgggcacatgctggaatgcctgggcgataaaccggcgcatttcattctgatcttcgataacggctacttctcagagtttggcaccttctctattactgactggatcggtcacacaccgaaagcgcttctcgccaagaactttaagctgcccgaaagcgcttttgatgggtttcccaaatgggaggtctattttgcacgtggcgcggttccaccagccacccctgcagcgcctttacagggactgaagctgccaccactcacgcataaatacgaactcctcgaacaagaacctcataaagtttttaaaggtggtcgtgaatggcgcgtggatagcactcgttttcccatttccaagactgtaaccggcgttgttcttgatttggaacccggcgcgttacgcgagcttcactggcatcctaatgctgacgagtggcaatatgtgatcgatggcaacattagtgtgacgatgttcggttctcatggccgtgtacgcaccgaacagatggagaagggtgatgtcgggtatattccacaggggtatggccacagcatcgaaaatgttggagatcgtccttgtcgcgtcttgattggctttaacacaggtaactaccaagcgatcgacttatcacagtggattgcaggtaatcccgcggatgttcttgccacgaacttctccaaacccaccagcctctttgaaaagttcccaaaacaggacgtgtttattgctcctggcaag

SEQ ID NO: 1408 - protein, 359 aa, synthetic construct
  REGION 1..359: note = Variant of oxalate decarboxylase from Gemmata sp. SH-PL17
MGDPTFMNNVPDPLLSGKDLPTFKFELEKSKGKVIGGSSGKEATVVQLPISKGIAGVSMVLEPGAMRELHWHATAAEWGFVLWGHVRTTVIDPQGLAETNDFGPGDVWYFPRGHGHMLECLGDKPAHFILIFDNGYFSEFGTFSITDWIGHTPKALLAKNFKLPESAFDGFPKWEVYFARGAVPPATPAAPLQGLKLPPLTHKYELLEQEPHKVFKGGREWRVDSTRFPISKTVTGVVLDLEPGALRELHWHPNADEWQYVIDGNISVTMFGSHGRVRTEQMEKGDVGYIPQGYGHSIENVGDRPCRVLIGFNTGNYQAIDLSQWIAGNPADVLATNFSKPTSLFEKFPKQDVFIAPGK

SEQ ID NO: 1409 - DNA, 1077 bp, synthetic construct
  misc_feature 1..1077: note = Variant of oxalate decarboxylase from Gemmata sp. SH-PL17
  source 1..1077: mol_type = other DNA
atgggtgaccctacctttatgaacaatgtaccagaccctctgctgtcgggcaaagatttgccgacgttcaagtttgagctggaaaagagccatggcaaagtcattggggggagttcgggaaaagaagcaaccgttgtccagttacctatctccaaaggcattgctggtgtgagcatggtacttgaaccgggtgcgatgcgcgaattgcactggcatgccacagcagcagagtgggggttcgtattatggggccacgtccgtacgacggtgatcgatccacaaggtctggccgaaaccaacgactttggaccgggcgacgtgtggtattttcctcgcggtcatgggcacatgctggaatgcctgggcgataaaccggcgcatttcattctgatcttcgataacggctacttctcagagtttggcaccttctctattactgactggatcggtcacacaccgaaagcgcttctcgccaagaactttaagctgcccgaaagcgcttttgatgggtttcccaaaaaagaggtctattttgcacgtggcgcggttccaccagccacccctgcagcgcctttacagggactgaagctgccaccactcacgcataaatacgaactcctcgaacaagaacctcataaagtttttaaaggtggtcgtgaatggcgcgtggatagcactcgttttcccatttccaagactgtaaccggcgttgttcttgatttggaacccggcgcgttacgcgagcttcactggcatcctaatgctgacgagtggcaatatgtgatcgatggcaacattagtgtgacgatgttcggttctcatggccgtgtacgcaccgaacagatggagaagggtgatgtcgggtatattccacaggggtatggccacagcatcgaaaatgttggagatcgtccttgtcgcgtcttgattggctttaacacaggtaactaccaagcgatcgacttatcacagtggattgcaggtaatcccgcggatgttcttgccacgaacttctccaaacccaccagcctctttgaaaagttcccaaaacaggacgtgtttattgctcctggcaag

SEQ ID NO: 1410 - protein, 359 aa, synthetic construct
  REGION 1..359: note = Variant of oxalate decarboxylase from Gemmata sp. SH-PL17
MGDPTFMNNVPDPLLSGKDLPTFKFELEKSHGKVIGGSSGKEATVVQLPISKGIAGVSMVLEPGAMRELHWHATAAEWGFVLWGHVRTTVIDPQGLAETNDFGPGDVWYFPRGHGHMLECLGDKPAHFILIFDNGYFSEFGTFSITDWIGHTPKALLAKNFKLPESAFDGFPKKEVYFARGAVPPATPAAPLQGLKLPPLTHKYELLEQEPHKVFKGGREWRVDSTRFPISKTVTGVVLDLEPGALRELHWHPNADEWQYVIDGNISVTMFGSHGRVRTEQMEKGDVGYIPQGYGHSIENVGDRPCRVLIGFNTGNYQAIDLSQWIAGNPADVLATNFSKPTSLFEKFPKQDVFIAPGK

SEQ ID NO: 1411 - DNA, 1077 bp, synthetic construct
  misc_feature 1..1077: note = Variant of oxalate decarboxylase from Gemmata sp. SH-PL17
  source 1..1077: mol_type = other DNA
atgggtgaccctacctttatgaacaatgtaccagaccctctgctgtcgggcaaagatttgccgacgttcaagtttgagctggaaaagagcgatggcaaagtcattggggggagttcgggaaaagaagcaaccgttgtccagttacctatctccaaaggcattgctggtgtgagcatggtacttgaaccgggtgcgatgcgcgaattgcactggcatgccacagcagcagagtgggggttcgtattatggggccacgtccgtacgacggtgatcgatccacaaggtctggccgaaaccaacgactttggaccgggcgacgtgtggtattttcctcgcggtcatgggcacatgctggaatgcctgggcgataaaccggcgcatttcattctgatcttcgataacggctacttctcagagtttggcaccttctctattactgactggatcggtcacacaccgaaagcgcttctcgccaagaactttaagctgcccgaaagcgcttttgatgggtttcccaaaaaagaggtctattttgcacgtggcgcggttccaccagccacccctgcagcgcctttacagggactgaagctgccaccactcacgcataaatacgaactcctcgaacaagaacctcataaagtttttaaaggtggtcgtgaatggcgcgtggatagcactcgttttcccatttccaagactgtaaccggcgttgttcttgatttggaacccggcgcgttacgcgagcttcactggcatcctaatgctgacgagtggcaatatgtgatcgatggcaacattagtgtgacgatgttcggttctcatggccgtgtacgcaccgaacagatggagaagggtgatgtcgggtatattccacaggggtatggccacagcatcgaaaatgttggagatcgtccttgtcgcgtcttgattggctttaacacaggtaactaccaagcgatcgacttatcacagtggattgcaggtaatcccgcggatgttcttgccacgaacttctccaaacccaccagcctctttgaaaagttcccaaaacaggacgtgtttattgctcctggcaag

SEQ ID NO: 1412 - protein, 359 aa, synthetic construct
  REGION 1..359: note = Variant of oxalate decarboxylase from Gemmata sp. SH-PL17
MGDPTFMNNVPDPLLSGKDLPTFKFELEKSDGKVIGGSSGKEATVVQLPISKGIAGVSMVLEPGAMRELHWHATAAEWGFVLWGHVRTTVIDPQGLAETNDFGPGDVWYFPRGHGHMLECLGDKPAHFILIFDNGYFSEFGTFSITDWIGHTPKALLAKNFKLPESAFDGFPKKEVYFARGAVPPATPAAPLQGLKLPPLTHKYELLEQEPHKVFKGGREWRVDSTRFPISKTVTGVVLDLEPGALRELHWHPNADEWQYVIDGNISVTMFGSHGRVRTEQMEKGDVGYIPQGYGHSIENVGDRPCRVLIGFNTGNYQAIDLSQWIAGNPADVLATNFSKPTSLFEKFPKQDVFIAPGK

SEQ ID NO: 1413 - DNA, 1077 bp, synthetic construct
  misc_feature 1..1077: note = Variant of oxalate decarboxylase from Gemmata sp. SH-PL17
  source 1..1077: mol_type = other DNA
atgggtgaccctacctttatgaacaatgtaccagaccctctgctgtcgggcaaagatttgccgacgttcaagtttgagctggaaaagagcaagggcaaagtcattggggggagttcgggaaaagaagcaaccgttgtccagttacctatctccaaaggcattgctggtgtgagcatggtacttgaaccgggtgcgatgcgcgaattgcactggcatgccacagcagcagagtggaatttcgtattatggggccacgtccgtacgacggtgatcgatccacaaggtctggccgaaaccaacgactttggaccgggcgacgtgtggtattttcctcgcggtcatgggcacatgctggaatgcctgggcgataaaccggcgcatttcattctgatcttcgataacggctacttctcagagtttggcaccttctctattactgactggatcggtcacacaccgaaagcgcttctcgccaagaactttaagctgcccgaaagcgcttttgatgggtttcccaaaaaagaggtctattttgcacgtggcgcggttccaccagccacccctgcagcgcctttacagggactgaagctgccaccactcacgcataaatacgaactcctcgaacaagaacctcataaagtttttaaaggtggtcgtgaatggcgcgtggatagcactcgttttcccatttccaagactgtaaccggcgttgttcttgatttggaacccggcgcgttacgcgagcttcactggcatcctaatgctgacgagtggcaatatgtgatcgatggcaacattagtgtgacgatgttcggttctcatggccgtgtacgcaccgaacagatggagaagggtgatgtcgggtatattccacaggggtatggccacagcatcgaaaatgttggagatcgtccttgtcgcgtcttgattggctttaacacaggtaactaccaagcgatcgacttatcacagtggattgcaggtaatcccgcggatgttcttgccacgaacttctccaaacccaccagcctctttgaaaagttcccaaaacaggacgtgtttattgctcctggcaag

SEQ ID NO: 1414 - protein, 359 aa, synthetic construct
  REGION 1..359: note = Variant of oxalate decarboxylase from Gemmata sp. SH-PL17
MGDPTFMNNVPDPLLSGKDLPTFKFELEKSKGKVIGGSSGKEATVVQLPISKGIAGVSMVLEPGAMRELHWHATAAEWNFVLWGHVRTTVIDPQGLAETNDFGPGDVWYFPRGHGHMLECLGDKPAHFILIFDNGYFSEFGTFSITDWIGHTPKALLAKNFKLPESAFDGFPKKEVYFARGAVPPATPAAPLQGLKLPPLTHKYELLEQEPHKVFKGGREWRVDSTRFPISKTVTGVVLDLEPGALRELHWHPNADEWQYVIDGNISVTMFGSHGRVRTEQMEKGDVGYIPQGYGHSIENVGDRPCRVLIGFNTGNYQAIDLSQWIAGNPADVLATNFSKPTSLFEKFPKQDVFIAPGK

SEQ ID NO: 1415 - DNA, 1077 bp, synthetic construct
  misc_feature 1..1077: note = Variant of oxalate decarboxylase from Gemmata sp. SH-PL17
  source 1..1077: mol_type = other DNA
atgggtgaccctacctttatgaacaatgtaccagaccctctgctgtcgggcaaagatttgccgacgttcaagtttgagctggaaaagagcaagggcaaagtcattgggaaaagttcgggaaaagaagcaaccgttgtccagttacctatctccaaaggcattgctggtgtgagcatggtacttgaaccgggtgcgatgcgcgaattgcactggcatgccacagcagcagagtgggggttcgtattatggggccacgtccgtacgacggtgatcgatccacaaggtctggccgaaaccaacgactttggaccgggcgacgtgtggtattttcctcgcggtcatgggcacatgctggaatgcctgggcgataaaccggcgcatttcattctgatcttcgataacggctacttctcagagtttggcaccttctctattactgactggatcggtcacacaccgaaagcgcttctcgccaagaactttaagctgcccgaaagcgcttttgatgggtttcccaaaaaagaggtctattttgcacgtggcgcggttccaccagccacccctgcagcgcctttacagggactgaagctgccaccactcacgcataaatacgaactcctcgaacaagaacctcataaagtttttaaaggtggtcgtgaatggcgcgtggatagcactcgttttcccatttccaagactgtaaccggcgttgttcttgatttggaacccggcgcgttacgcgagcttcactggcatcctaatgctgacgagtggcaatatgtgatcgatggcaacattagtgtgacgatgttcggttctcatggccgtgtacgcaccgaacagatggagaagggtgatgtcgggtatattccacaggggtatggccacagcatcgaaaatgttggagatcgtccttgtcgcgtcttgattggctttaacacaggtaactaccaagcgatcgacttatcacagtggattgcaggtaatcccgcggatgttcttgccacgaacttctccaaacccaccagcctctttgaaaagttcccaaaacaggacgtgtttattgctcctggcaag

SEQ ID NO: 1416 - protein, 359 aa, synthetic construct
  REGION 1..359: note = Variant of oxalate decarboxylase from Gemmata sp. SH-PL17
MGDPTFMNNVPDPLLSGKDLPTFKFELEKSKGKVIGKSSGKEATVVQLPISKGIAGVSMVLEPGAMRELHWHATAAEWGFVLWGHVRTTVIDPQGLAETNDFGPGDVWYFPRGHGHMLECLGDKPAHFILIFDNGYFSEFGTFSITDWIGHTPKALLAKNFKLPESAFDGFPKKEVYFARGAVPPATPAAPLQGLKLPPLTHKYELLEQEPHKVFKGGREWRVDSTRFPISKTVTGVVLDLEPGALRELHWHPNADEWQYVIDGNISVTMFGSHGRVRTEQMEKGDVGYIPQGYGHSIENVGDRPCRVLIGFNTGNYQAIDLSQWIAGNPADVLATNFSKPTSLFEKFPKQDVFIAPGK

SEQ ID NO: 1417 - DNA, 1077 bp, synthetic construct
  misc_feature 1..1077: note = Variant of oxalate decarboxylase from Gemmata sp. SH-PL17
  source 1..1077: mol_type = other DNA
atgggtgaccctacctttatgaacaatgtaccagaccctctgctgtcgggcaaagatttgccgacgttcaagtttgagctggaaaagagcattggcaaagtcattggggggagttcgggaaaagaagcaaccgttgtccagttacctatctccaaaggcattgctggtgtgagcatggtacttgaaccgggtgcgatgcgcgaattgcactggcatgccacagcagcagagtgggggttcgtattatggggccacgtccgtacgacggtgatcgatccacaaggtctggccgaaaccaacgactttggaccgggcgacgtgtggtattttcctcgcggtcatgggcacatgctggaatgcctgggcgataaaccggcgcatttcattctgatcttcgataacggctacttctcagagtttggcaccttctctattactgactggatcggtcacacaccgaaagcgcttctcgccaagaactttaagctgcccgaaagcgcttttgatgggtttcccaaaaaagaggtctattttgcacgtggcgcggttccaccagccacccctgcagcgcctttacagggactgaagctgccaccactcacgcataaatacgaactcctcgaacaagaacctcataaagtttttaaaggtggtcgtgaatggcgcgtggatagcactcgttttcccatttccaagactgtaaccggcgttgttcttgatttggaacccggcgcgttacgcgagcttcactggcatcctaatgctgacgagtggcaatatgtgatcgatggcaacattagtgtgacgatgttcggttctcatggccgtgtacgcaccgaacagatggagaagggtgatgtcgggtatattccacaggggtatggccacagcatcgaaaatgttggagatcgtccttgtcgcgtcttgattggctttaacacaggtaactaccaagcgatcgacttatcacagtggattgcaggtaatcccgcggatgttcttgccacgaacttctccaaacccaccagcctctttgaaaagttcccaaaacaggacgtgtttattgctcctggcaag

SEQ ID NO: 1418 - protein, 359 aa, synthetic construct
  REGION 1..359: note = Variant of oxalate decarboxylase from Gemmata sp. SH-PL17
MGDPTFMNNVPDPLLSGKDLPTFKFELEKSIGKVIGGSSGKEATVVQLPISKGIAGVSMVLEPGAMRELHWHATAAEWGFVLWGHVRTTVIDPQGLAETNDFGPGDVWYFPRGHGHMLECLGDKPAHFILIFDNGYFSEFGTFSITDWIGHTPKALLAKNFKLPESAFDGFPKKEVYFARGAVPPATPAAPLQGLKLPPLTHKYELLEQEPHKVFKGGREWRVDSTRFPISKTVTGVVLDLEPGALRELHWHPNADEWQYVIDGNISVTMFGSHGRVRTEQMEKGDVGYIPQGYGHSIENVGDRPCRVLIGFNTGNYQAIDLSQWIAGNPADVLATNFSKPTSLFEKFPKQDVFIAPGK

SEQ ID NO: 1419 - DNA, 1077 bp, synthetic construct
  misc_feature 1..1077: note = Variant of oxalate decarboxylase from Gemmata sp. SH-PL17
  source 1..1077: mol_type = other DNA
atgggtgaccctacctttatgaacaatgtaccagaccctctgctgtcgggcaaagatttgccgacgttcaagtttgagctggaaaagagcaagggcaaagtcattgggcatagttcgggaaaagaagcaaccgttgtccagttacctatctccaaaggcattgctggtgtgagcatggtacttgaaccgggtgcgatgcgcgaattgcactggcatgccacagcagcagagtgggggttcgtattatggggccacgtccgtacgacggtgatcgatccacaaggtctggccgaaaccaacgactttggaccgggcgacgtgtggtattttcctcgcggtcatgggcacatgctggaatgcctgggcgataaaccggcgcatttcattctgatcttcgataacggctacttctcagagtttggcaccttctctattactgactggatcggtcacacaccgaaagcgcttctcgccaagaactttaagctgcccgaaagcgcttttgatgggtttcccaaaaaagaggtctattttgcacgtggcgcggttccaccagccacccctgcagcgcctttacagggactgaagctgccaccactcacgcataaatacgaactcctcgaacaagaacctcataaagtttttaaaggtggtcgtgaatggcgcgtggatagcactcgttttcccatttccaagactgtaaccggcgttgttcttgatttggaacccggcgcgttacgcgagcttcactggcatcctaatgctgacgagtggcaatatgtgatcgatggcaacattagtgtgacgatgttcggttctcatggccgtgtacgcaccgaacagatggagaagggtgatgtcgggtatattccacaggggtatggccacagcatcgaaaatgttggagatcgtccttgtcgcgtcttgattggctttaacacaggtaactaccaagcgatcgacttatcacagtggattgcaggtaatcccgcggatgttcttgccacgaacttctccaaacccaccagcctctttgaaaagttcccaaaacaggacgtgtttattgctcctggcaag

SEQ ID NO: 1420 - protein, 359 aa, synthetic construct
  REGION 1..359: note = Variant of oxalate decarboxylase from Gemmata sp. SH-PL17
MGDPTFMNNVPDPLLSGKDLPTFKFELEKSKGKVIGHSSGKEATVVQLPISKGIAGVSMVLEPGAMRELHWHATAAEWGFVLWGHVRTTVIDPQGLAETNDFGPGDVWYFPRGHGHMLECLGDKPAHFILIFDNGYFSEFGTFSITDWIGHTPKALLAKNFKLPESAFDGFPKKEVYFARGAVPPATPAAPLQGLKLPPLTHKYELLEQEPHKVFKGGREWRVDSTRFPISKTVTGVVLDLEPGALRELHWHPNADEWQYVIDGNISVTMFGSHGRVRTEQMEKGDVGYIPQGYGHSIENVGDRPCRVLIGFNTGNYQAIDLSQWIAGNPADVLATNFSKPTSLFEKFPKQDVFIAPGK

SEQ ID NO: 1421 - DNA, 1077 bp, synthetic construct
  misc_feature 1..1077: note = Variant of oxalate decarboxylase from Gemmata sp. SH-PL17
  source 1..1077: mol_type = other DNA
atgggtgaccctacctttatgaacaatgtaccagaccctctgctgtcgggcaaagatttgccgacgttcaagtttgagctggaaaagagcaagggcaaagtcattggggggagttcgggaaaagaagcaaccgttgtccagttacctatctccaaaggcattgctggtgtgagcatggtacttgaaccgggtgcgatgcgcgaattgcactggcatgccacagcagcagagtgggggttcgtattatggggccacgtccgtacgacggtgatcgatccacaaggtctggccgaaaccaacgactttggaccgggcgacgtgtggtattttcctcgcggtcatgggcacatgctggaatgcctgggcgataaaccggcgcatttcattctgatcttcgataacggctacttctcagagtttggcaccttctctattactgactggatcggtcacacaccgaaagcgcttctcgccaagaactttaagctgcccgaaagcgcttttgatgggtttcccaaaaaagaggtctattttgcacgtggcgcggttccaccagccacccctgcagcgcctttacagggactgaagctgccaccactcacgcataaatacgaactcctcgaacaagaacctcataaagtttttaaaggtggtcgtgaatggcgcgtggatagcactcgttttcccatttccaagactgtaaccggcgttgttcttgatttggaacccggcgcgttacgcgagcttcactggcatcctaatgctgacgagtggcaatatgtgatcgatggcaacattagtgtgacgatgttcggttctcatggccgtgtacgcaccgaacagatggagaagggtgatgtcgggtatattccacaggggtatggccacagcatcgaaaatgttggagatcgtccttgtcgcgtcttgattggctttaacacaggtaactactgcgcgatcgacttatcacagtggattgcaggtaatcccgcggatgttcttgccacgaacttctccaaacccaccagcctctttgaaaagttcccaaaacaggacgtgtttattgctcctggcaag

SEQ ID NO: 1422 - protein, 359 aa, synthetic construct
  REGION 1..359: note = Variant of oxalate decarboxylase from Gemmata sp. SH-PL17
MGDPTFMNNVPDPLLSGKDLPTFKFELEKSKGKVIGGSSGKEATVVQLPISKGIAGVSMVLEPGAMRELHWHATAAEWGFVLWGHVRTTVIDPQGLAETNDFGPGDVWYFPRGHGHMLECLGDKPAHFILIFDNGYFSEFGTFSITDWIGHTPKALLAKNFKLPESAFDGFPKKEVYFARGAVPPATPAAPLQGLKLPPLTHKYELLEQEPHKVFKGGREWRVDSTRFPISKTVTGVVLDLEPGALRELHWHPNADEWQYVIDGNISVTMFGSHGRVRTEQMEKGDVGYIPQGYGHSIENVGDRPCRVLIGFNTGNYCAIDLSQWIAGNPADVLATNFSKPTSLFEKFPKQDVFIAPGK

SEQ ID NO: 1423 - DNA, 1077 bp, synthetic construct
  misc_feature 1..1077: note = Variant of oxalate decarboxylase from Gemmata sp. SH-PL17
  source 1..1077: mol_type = other DNA
atgggtgaccctacctttatgaacaatgtaccagaccctctgctgtcgggcaaagatttgccgacgttcaagtttgagctggaaaagagcttcggcaaagtcattggggggagttcgggaaaagaagcaaccgttgtccagttacctatctccaaaggcattgctggtgtgagcatggtacttgaaccgggtgcgatgcgcgaattgcactggcatgccacagcagcagagtgggggttcgtattatggggccacgtccgtacgacggtgatcgatccacaaggtctggccgaaaccaacgactttggaccgggcgacgtgtggtattttcctcgcggtcatgggcacatgctggaatgcctgggcgataaaccggcgcatttcattctgatcttcgataacggctacttctcagagtttggcaccttctctattactgactggatcggtcacacaccgaaagcgcttctcgccaagaactttaagctgcccgaaagcgcttttgatgggtttcccaaaaaagaggtctattttgcacgtggcgcggttccaccagccacccctgcagcgcctttacagggactgaagctgccaccactcacgcataaatacgaactcctcgaacaagaacctcataaagtttttaaaggtggtcgtgaatggcgcgtggatagcactcgttttcccatttccaagactgtaaccggcgttgttcttgatttggaacccggcgcgttacgcgagcttcactggcatcctaatgctgacgagtggcaatatgtgatcgatggcaacattagtgtgacgatgttcggttctcatggccgtgtacgcaccgaacagatggagaagggtgatgtcgggtatattccacaggggtatggccacagcatcgaaaatgttggagatcgtccttgtcgcgtcttgattggctttaacacaggtaactaccaagcgatcgacttatcacagtggattgcaggtaatcccgcggatgttcttgccacgaacttctccaaacccaccagcctctttgaaaagttcccaaaacaggacgtgtttattgctcctggcaag

SEQ ID NO: 1424 - protein, 359 aa, synthetic construct
  REGION 1..359: note = Variant of oxalate decarboxylase from Gemmata sp. SH-PL17
MGDPTFMNNVPDPLLSGKDLPTFKFELEKSFGKVIGGSSGKEATVVQLPISKGIAGVSMVLEPGAMRELHWHATAAEWGFVLWGHVRTTVIDPQGLAETNDFGPGDVWYFPRGHGHMLECLGDKPAHFILIFDNGYFSEFGTFSITDWIGHTPKALLAKNFKLPESAFDGFPKKEVYFARGAVPPATPAAPLQGLKLPPLTHKYELLEQEPHKVFKGGREWRVDSTRFPISKTVTGVVLDLEPGALRELHWHPNADEWQYVIDGNISVTMFGSHGRVRTEQMEKGDVGYIPQGYGHSIENVGDRPCRVLIGFNTGNYQAIDLSQWIAGNPADVLATNFSKPTSLFEKFPKQDVFIAPGK

SEQ ID NO: 1425 - DNA, 1077 bp, synthetic construct
  misc_feature 1..1077: note = Variant of oxalate decarboxylase from Gemmata sp. SH-PL17
  source 1..1077: mol_type = other DNA
atgggtgaccctacctttatgaacaatgtaccagaccctctgctgtcgggcaaagatttgccgacgttcaagtttgagctggaaaagagcaagggcaaagtcattggggggagttcgggaaaagaagcaaccgttgtccagttacctatctccaaaggcattgctggtgtgagcatggtacttgaaccgggtgcgatgcgcgaattgcactggcatgccacagcagcagagtggccgttcgtattatggggccacgtccgtacgacggtgatcgatccacaaggtctggccgaaaccaacgactttggaccgggcgacgtgtggtattttcctcgcggtcatgggcacatgctggaatgcctgggcgataaaccggcgcatttcattctgatcttcgataacggctacttctcagagtttggcaccttctctattactgactggatcggtcacacaccgaaagcgcttctcgccaagaactttaagctgcccgaaagcgcttttgatgggtttcccaaaaaagaggtctattttgcacgtggcgcggttccaccagccacccctgcagcgcctttacagggactgaagctgccaccactcacgcataaatacgaactcctcgaacaagaacctcataaagtttttaaaggtggtcgtgaatggcgcgtggatagcactcgttttcccatttccaagactgtaaccggcgttgttcttgatttggaacccggcgcgttacgcgagcttcactggcatcctaatgctgacgagtggcaatatgtgatcgatggcaacattagtgtgacgatgttcggttctcatggccgtgtacgcaccgaacagatggagaagggtgatgtcgggtatattccacaggggtatggccacagcatcgaaaatgttggagatcgtccttgtcgcgtcttgattggctttaacacaggtaactaccaagcgatcgacttatcacagtggattgcaggtaatcccgcggatgttcttgccacgaacttctccaaacccaccagcctctttgaaaagttcccaaaacaggacgtgtttattgctcctggcaag

SEQ ID NO: 1426 - protein, 359 aa, synthetic construct
  REGION 1..359: note = Variant of oxalate decarboxylase from Gemmata sp. SH-PL17
MGDPTFMNNVPDPLLSGKDLPTFKFELEKSKGKVIGGSSGKEATVVQLPISKGIAGVSMVLEPGAMRELHWHATAAEWPFVLWGHVRTTVIDPQGLAETNDFGPGDVWYFPRGHGHMLECLGDKPAHFILIFDNGYFSEFGTFSITDWIGHTPKALLAKNFKLPESAFDGFPKKEVYFARGAVPPATPAAPLQGLKLPPLTHKYELLEQEPHKVFKGGREWRVDSTRFPISKTVTGVVLDLEPGALRELHWHPNADEWQYVIDGNISVTMFGSHGRVRTEQMEKGDVGYIPQGYGHSIENVGDRPCRVLIGFNTGNYQAIDLSQWIAGNPADVLATNFSKPTSLFEKFPKQDVFIAPGK

SEQ ID NO: 1427 - DNA, 1077 bp, synthetic construct
  misc_feature 1..1077: note = Variant of oxalate decarboxylase from Gemmata sp. SH-PL17
  source 1..1077: mol_type = other DNA
atgggtgaccctacctttatgaacaatgtaccagaccctctgctgtcgggcaaagatttgccgacgttcaagtttgagctggaaaagagcaagggcaaagtcattggggggagttcgggaaaagaagcaaccgttgtccagttacctatctccaaaggcattgctggtgtgagcatggtacttgaaccgggtgcgatgcgcgaattgcactggcatgccacagcagcagagtgggggttcgtattatggggccacgtccgtacgacggtgatcgatccacaaggtctggccgaaaccaacgactttggaccgggcgacgtgtggtattttcctcgcggtcatgggcacatgctggaatgcctgggcgataaaccggcgcatttcattctgatcttcgataacggctacttctcagagtttggcaccttctctattactgactggatcggtcacacaccgaaagcgcttctcgccaagaactttaagctgcccgaaagcgcttttgatgggtttcccaaaaaagaggtctattttgcacgtggcgcggttccaccagccacccctgcagcgcctttacagggaccgaagctgccaccactcacgcataaatacgaactcctcgaacaagaacctcataaagtttttaaaggtggtcgtgaatggcgcgtggatagcactcgttttcccatttccaagactgtaaccggcgttgttcttgatttggaacccggcgcgttacgcgagcttcactggcatcctaatgctgacgagtggcaatatgtgatcgatggcaacattagtgtgacgatgttcggttctcatggccgtgtacgcaccgaacagatggagaagggtgatgtcgggtatattccacaggggtatggccacagcatcgaaaatgttggagatcgtccttgtcgcgtcttgattggctttaacacaggtaactaccaagcgatcgacttatcacagtggattgcaggtaatcccgcggatgttcttgccacgaacttctccaaacccaccagcctctttgaaaagttcccaaaacaggacgtgtttattgctcctggcaag

SEQ ID NO: 1428 - protein, 359 aa, synthetic construct
  REGION 1..359: note = Variant of oxalate decarboxylase from Gemmata sp. SH-PL17
MGDPTFMNNVPDPLLSGKDLPTFKFELEKSKGKVIGGSSGKEATVVQLPISKGIAGVSMVLEPGAMRELHWHATAAEWGFVLWGHVRTTVIDPQGLAETNDFGPGDVWYFPRGHGHMLECLGDKPAHFILIFDNGYFSEFGTFSITDWIGHTPKALLAKNFKLPESAFDGFPKKEVYFARGAVPPATPAAPLQGPKLPPLTHKYELLEQEPHKVFKGGREWRVDSTRFPISKTVTGVVLDLEPGALRELHWHPNADEWQYVIDGNISVTMFGSHGRVRTEQMEKGDVGYIPQGYGHSIENVGDRPCRVLIGFNTGNYQAIDLSQWIAGNPADVLATNFSKPTSLFEKFPKQDVFIAPGK

SEQ ID NO: 1429 - DNA, 1077 bp, synthetic construct
  misc_feature 1..1077: note = Variant of oxalate decarboxylase from Gemmata sp. SH-PL17
  source 1..1077: mol_type = other DNA
atgggtgaccctacctttatgaacaatgtaccagaccctctgctgtcgggcaaagatttgccgacgttcaagtttgagctggaaaagagcaagggcaaagtcattggggggagttcgggaaaagaagcaaccgttgtccagttacctatctccaaaggcattgctggtgtgagcatggtacttgaaccgggtgcgatgcgcgaattgcactggcatgccacagcagcagagtgggggttcgtattatggggccacgtccgtacgacggtgatcgatccacaaggtctggccgaaaccaacgactttggaccgggcgacgtgtggtattttcctcgcggtcatgggcacatgctggaatgcctgggcgataaaccggcgcatttcattctgatcttcgataacggctacttctcagagtttggcaccttctctattactgactggatcggtcacacaccgaaagcgcttctcgccaagaactttaagctgcccgaaagcgcttttgatgggtttcccaaaaaagaggtctattttgcacgtggcgcggttccaccagccacccctgcagcgcctttacagggactgaagctgccaccactcacgcataaatacgaactcctcgaacaagaacctcataaagtttttaaaggtggtcgtgaatggcgcgtggatagcactcgttttcccatttccaagactgtaaccggcgttgttcttgatttggaacccggcgcgttacgcgagcttcactggcatcctaatgctgacgagtggcaatatgtgatcgatggcaacattagtgtgacgatgttcggttctcatggccgtgtacgcaccgaacagatggagaagggtgatgtcgggtatattccacaggggtatggccacagcatcgaaaatgttggagatcgtccttgtcgcgtcttgattggctttaacacaggtaactacatcgcgatcgacttatcacagtggattgcaggtaatcccgcggatgttcttgccacgaacttctccaaacccaccagcctctttgaaaagttcccaaaacaggacgtgtttattgctcctggcaag

SEQ ID NO: 1430 - protein, 359 aa, synthetic construct
  REGION 1..359: note = Variant of oxalate decarboxylase from Gemmata sp. SH-PL17
MGDPTFMNNVPDPLLSGKDLPTFKFELEKSKGKVIGGSSGKEATVVQLPISKGIAGVSMVLEPGAMRELHWHATAAEWGFVLWGHVRTTVIDPQGLAETNDFGPGDVWYFPRGHGHMLECLGDKPAHFILIFDNGYFSEFGTFSITDWIGHTPKALLAKNFKLPESAFDGFPKKEVYFARGAVPPATPAAPLQGLKLPPLTHKYELLEQEPHKVFKGGREWRVDSTRFPISKTVTGVVLDLEPGALRELHWHPNADEWQYVIDGNISVTMFGSHGRVRTEQMEKGDVGYIPQGYGHSIENVGDRPCRVLIGFNTGNYIAIDLSQWIAGNPADVLATNFSKPTSLFEKFPKQDVFIAPGK

SEQ ID NO: 1431 - DNA, 1077 bp, synthetic construct
  misc_feature 1..1077: note = Variant of oxalate decarboxylase from Gemmata sp. SH-PL17
  source 1..1077: mol_type = other DNA
atgggtgaccctacctttatgaacaatgtaccagaccctctgctgtcgggcaaagatttgccgacgttcaagtttgagctggaaaagagcaagggcaaagtcattggggggagttcgggaaaagaagcaaccgttgtccagttacctatctccaaaggcattgctggtgtgagcatggtacttgaaccgggtgcgatgcgcgaattgcactggcatgccacagcagcagagtgggggttcgtattatggggccacgtccgtacgacggtgatcgatccacaaggtctggccgaaaccaacgactttggaccgggcgacgtgtggtattttcctcgcggtcatgggcacatgctggaatgcctgggcgataaaccggcgcatttcattctgatcttcgataacggctacttctcagagtttggcaccttctctattactgactggatcggtcacacaccgaaagcgcttctcgccaagaactttgccctgcccgaaagcgcttttgatgggtttcccaaaaaagaggtctattttgcacgtggcgcggttccaccagccacccctgcagcgcctttacagggactgaagctgccaccactcacgcataaatacgaactcctcgaacaagaacctcataaagtttttaaaggtggtcgtgaatggcgcgtggatagcactcgttttcccatttccaagactgtaaccggcgttgttcttgatttggaacccggcgcgttacgcgagcttcactggcatcctaatgctgacgagtggcaatatgtgatcgatggcaacattagtgtgacgatgttcggttctcatggccgtgtacgcaccgaacagatggagaagggtgatgtcgggtatattccacaggggtatggccacagcatcgaaaatgttggagatcgtccttgtcgcgtcttgattggctttaacacaggtaactaccaagcgatcgacttatcacagtggattgcaggtaatcccgcggatgttcttgccacgaacttctccaaacccaccagcctctttgaaaagttcccaaaacaggacgtgtttattgctcctggcaag

SEQ ID NO: 1432 - protein, 359 aa, synthetic construct
  REGION 1..359: note = Variant of oxalate decarboxylase from Gemmata sp. SH-PL17
MGDPTFMNNVPDPLLSGKDLPTFKFELEKSKGKVIGGSSGKEATVVQLPISKGIAGVSMVLEPGAMRELHWHATAAEWGFVLWGHVRTTVIDPQGLAETNDFGPGDVWYFPRGHGHMLECLGDKPAHFILIFDNGYFSEFGTFSITDWIGHTPKALLAKNFALPESAFDGFPKKEVYFARGAVPPATPAAPLQGLKLPPLTHKYELLEQEPHKVFKGGREWRVDSTRFPISKTVTGVVLDLEPGALRELHWHPNADEWQYVIDGNISVTMFGSHGRVRTEQMEKGDVGYIPQGYGHSIENVGDRPCRVLIGFNTGNYQAIDLSQWIAGNPADVLATNFSKPTSLFEKFPKQDVFIAPGK

SEQ ID NO: 1433 - DNA, 1077 bp, synthetic construct
  misc_feature 1..1077: note = Variant of oxalate decarboxylase from Gemmata sp. SH-PL17
  source 1..1077: mol_type = other DNA
atgggtgaccctacctttatgaacaatgtaccagaccctctgctgtcgggcaaagatttgccgacgttcaagtttgagctggaaaagagcaagggcaaagtcattggggggagttcgggaaaagaagcaaccgttgtccagttacctatctccaaaggcattgctggtgtgagcatggtacttgaaccgggtgcgatgcgcgaattgcactggcatgccacagcagcagagtgggggttcgtattatggggccacgtccgtacgacggtgatcgatccacaaggtctggccgaaaccaacgactttggaccgggcgacgtgtggtattttcctcgcggtcatgggcacatgctggaatgcctgggcgataaaccggcgcatttcattctgatcttcgataacggctacttctcagagtttggcaccttctctattactgactggatcggtcacacaccgaaagcgcttctcgccaagaactttaagctgcccgaaagcgcttttgatgggtttcccaaaaaagaggtctattttgcacgtggcgcggttccaccagccacccctgcagcgcctttacagggactgaagctgccaccactcacgcataaatacgaactcctcgaacaagaacctcataaagtttttaaaggtggtcgtgaatggcgcgtggatagcactcgttttcccatttccaagactgtaaccggcgttgttcttgatttggaacccggcgcgttacgcgagcttcactggcatcctaatgctgacgagtggcaatatgtgatcgatggcaacattagtgtgacgatgttcggttctcatggccgtcagcgcaccgaacagatggagaagggtgatgtcgggtatattccacaggggtatggccacagcatcgaaaatgttggagatcgtccttgtcgcgtcttgattggctttaacacaggtaactaccaagcgatcgacttatcacagtggattgcaggtaatcccgcggatgttcttgccacgaacttctccaaacccaccagcctctttgaaaagttcccaaaacaggacgtgtttattgctcctggcaag

SEQ ID NO: 1434 - protein, 359 aa, synthetic construct
  REGION 1..359: note = Variant of oxalate decarboxylase from Gemmata sp. SH-PL17
MGDPTFMNNVPDPLLSGKDLPTFKFELEKSKGKVIGGSSGKEATVVQLPISKGIAGVSMVLEPGAMRELHWHATAAEWGFVLWGHVRTTVIDPQGLAETNDFGPGDVWYFPRGHGHMLECLGDKPAHFILIFDNGYFSEFGTFSITDWIGHTPKALLAKNFKLPESAFDGFPKKEVYFARGAVPPATPAAPLQGLKLPPLTHKYELLEQEPHKVFKGGREWRVDSTRFPISKTVTGVVLDLEPGALRELHWHPNADEWQYVIDGNISVTMFGSHGRQRTEQMEKGDVGYIPQGYGHSIENVGDRPCRVLIGFNTGNYQAIDLSQWIAGNPADVLATNFSKPTSLFEKFPKQDVFIAPGK

SEQ ID NO: 1435 - DNA, 1077 bp, synthetic construct
  misc_feature 1..1077: note = Variant of oxalate decarboxylase from Gemmata sp. SH-PL17
  source 1..1077: mol_type = other DNA
atgggtgaccctacctttatgaacaatgtaccagaccctctgctgtcgggcaaagatttgccgacgttcaagttttttctggaaaagagcaagggcaaagtcattggggggagttcgggaaaagaagcaaccgttgtccagttacctatctccaaaggcattgctggtgtgagcatggtacttgaaccgggtgcgatgcgcgaattgcactggcatgccacagcagcagagtgggggttcgtattatggggccacgtccgtacgacggtgatcgatccacaaggtctggccgaaaccaacgactttggaccgggcgacgtgtggtattttcctcgcggtcatgggcacatgctggaatgcctgggcgataaaccggcgcatttcattctgatcttcgataacggctacttctcagagtttggcaccttctctattactgactggatcggtcacacaccgaaagcgcttctcgccaagaactttaagctgcccgaaagcgcttttgatgggtttcccaaaaaagaggtctattttgcacgtggcgcggttccaccagccacccctgcagcgcctttacagggactgaagctgccaccactcacgcataaatacgaactcctcgaacaagaacctcataaagtttttaaaggtggtcgtgaatggcgcgtggatagcactcgttttcccatttccaagactgtaaccggcgttgttcttgatttggaacccggcgcgttacgcgagcttcactggcatcctaatgctgacgagtggcaatatgtgatcgatggcaacattagtgtgacgatgttcggttctcatggccgtgtacgcaccgaacagatggagaagggtgatgtcgggtatattccacaggggtatggccacagcatcgaaaatgttggagatcgtccttgtcgcgtcttgattggctttaacacaggtaactaccaagcgatcgacttatcacagtggattgcaggtaatcccgcggatgttcttgccacgaacttctccaaacccaccagcctctttgaaaagttcccaaaacaggacgtgtttattgctcctggcaag

SEQ ID NO: 1436 - protein, 359 aa, synthetic construct
  REGION 1..359: note = Variant of oxalate decarboxylase from Gemmata sp. SH-PL17
MGDPTFMNNVPDPLLSGKDLPTFKFFLEKSKGKVIGGSSGKEATVVQLPISKGIAGVSMVLEPGAMRELHWHATAAEWGFVLWGHVRTTVIDPQGLAETNDFGPGDVWYFPRGHGHMLECLGDKPAHFILIFDNGYFSEFGTFSITDWIGHTPKALLAKNFKLPESAFDGFPKKEVYFARGAVPPATPAAPLQGLKLPPLTHKYELLEQEPHKVFKGGREWRVDSTRFPISKTVTGVVLDLEPGALRELHWHPNADEWQYVIDGNISVTMFGSHGRVRTEQMEKGDVGYIPQGYGHSIENVGDRPCRVLIGFNTGNYQAIDLSQWIAGNPADVLATNFSKPTSLFEKFPKQDVFIAPGK

SEQ ID NO: 1437 - DNA, 1077 bp, synthetic construct
  misc_feature 1..1077: note = Variant of oxalate decarboxylase from Gemmata sp. SH-PL17
  source 1..1077: mol_type = other DNA
atgggtgaccctacctttatgaacaatgtaccagaccctctgctgtcgggcaaagatttgccgacgttcaagtttgagctggaaaagagcaagggcaaagtcattggggggagttcgggaaaagaagcaaccgttgtccagttacctatctccaaaggcattgctggtgtgagcatggtacttgaaccgggtgcgatgcgcgaattgcactggcatgccacagcagcagagtgggggttcgtattatggggccacgtccgtacgacggtgatcgatccacaaggtctggccgaaaccaacgactttggaccgggcgacgtgtggtattttcctcgcggtcatgggcacatgctggaatgcctgggcgataaaccggcgcatttcattctgatcttcgataacggctacttctcagagtttggcaccttctctattactgactggatcggtcacacaccgaaagcgcttctcgccaagaactttaagctgcccgaaagcgcttttgatgggtttcccaaaaaagaggtctattttgcacgtggcgcggttccaccagccacccctgcagcgcctttacagggactgaagctgccaccactcacgcataaatacgaactcctcgaacaagaacctcataaagtttttaaaggtggtcgtgaatggcgcgtggatagcactcgttttcccatttccaagactgtaaccggcgttgttcttgatttggaacccggcgcgttacgcgagcttcactggcatcctaatgctgacgagtggcaatatgtgatcgatggcaacattagtgtgacgatgttcggttctcatggccgttgccgcaccgaacagatggagaagggtgatgtcgggtatattccacaggggtatggccacagcatcgaaaatgttggagatcgtccttgtcgcgtcttgattggctttaacacaggtaactaccaagcgatcgacttatcacagtggattgcaggtaatcccgcggatgttcttgccacgaacttctccaaacccaccagcctctttgaaaagttcccaaaacaggacgtgtttattgctcctggcaag

SEQ ID NO: 1438 - protein, 359 aa, synthetic construct
  REGION 1..359: note = Variant of oxalate decarboxylase from Gemmata sp. SH-PL17
MGDPTFMNNVPDPLLSGKDLPTFKFELEKSKGKVIGGSSGKEATVVQLPISKGIAGVSMVLEPGAMRELHWHATAAEWGFVLWGHVRTTVIDPQGLAETNDFGPGDVWYFPRGHGHMLECLGDKPAHFILIFDNGYFSEFGTFSITDWIGHTPKALLAKNFKLPESAFDGFPKKEVYFARGAVPPATPAAPLQGLKLPPLTHKYELLEQEPHKVFKGGREWRVDSTRFPISKTVTGVVLDLEPGALRELHWHPNADEWQYVIDGNISVTMFGSHGRCRTEQMEKGDVGYIPQGYGHSIENVGDRPCRVLIGFNTGNYQAIDLSQWIAGNPADVLATNFSKPTSLFEKFPKQDVFIAPGK

SEQ ID NO: 1439 - DNA, 1077 bp, synthetic construct
  misc_feature 1..1077: note = Variant of oxalate decarboxylase from Gemmata sp. SH-PL17
  source 1..1077: mol_type = other DNA
atgggtgaccctacctttatgaacaatgtaccagaccctctgctgtcgggcaaagatttgccgacgttcaagtttgagctggaaaagagcaagggcaaagtcattggggggagttcgggaaaagaagcaaccgttgtccagttacctatctccaaaggcattgctggtgtgagcatggtacttgaaccgggtgcgatgcgcgaattgcactggcatgccacagcagcagagtggcacttcgtattatggggccacgtccgtacgacggtgatcgatccacaaggtctggccgaaaccaacgactttggaccgggcgacgtgtggtattttcctcgcggtcatgggcacatgctggaatgcctgggcgataaaccggcgcatttcattctgatcttcgataacggctacttctcagagtttggcaccttctctattactgactggatcggtcacacaccgaaagcgcttctcgccaagaactttaagctgcccgaaagcgcttttgatgggtttcccaaaaaagaggtctattttgcacgtggcgcggttccaccagccacccctgcagcgcctttacagggactgaagctgccaccactcacgcataaatacgaactcctcgaacaagaacctcataaagtttttaaaggtggtcgtgaatggcgcgtggatagcactcgttttcccatttccaagactgtaaccggcgttgttcttgatttggaacccggcgcgttacgcgagcttcactggcatcctaatgctgacgagtggcaatatgtgatcgatggcaacattagtgtgacgatgttcggttctcatggccgtgtacgcaccgaacagatggagaagggtgatgtcgggtatattccacaggggtatggccacagcatcgaaaatgttggagatcgtccttgtcgcgtcttgattggctttaacacaggtaactaccaagcgatcgacttatcacagtggattgcaggtaatcccgcggatgttcttgccacgaacttctccaaacccaccagcctctttgaaaagttcccaaaacaggacgtgtttattgctcctggcaag

SEQ ID NO: 1440 - protein, 359 aa, synthetic construct
  REGION 1..359: note = Variant of oxalate decarboxylase from Gemmata sp. SH-PL17
MGDPTFMNNVPDPLLSGKDLPTFKFELEKSKGKVIGGSSGKEATVVQLPISKGIAGVSMVLEPGAMRELHWHATAAEWHFVLWGHVRTTVIDPQGLAETNDFGPGDVWYFPRGHGHMLECLGDKPAHFILIFDNGYFSEFGTFSITDWIGHTPKALLAKNFKLPESAFDGFPKKEVYFARGAVPPATPAAPLQGLKLPPLTHKYELLEQEPHKVFKGGREWRVDSTRFPISKTVTGVVLDLEPGALRELHWHPNADEWQYVIDGNISVTMFGSHGRVRTEQMEKGDVGYIPQGYGHSIENVGDRPCRVLIGFNTGNYQAIDLSQWIAGNPADVLATNFSKPTSLFEKFPKQDVFIAPGK

SEQ ID NO: 1441 - DNA, 1077 bp, synthetic construct
  misc_feature 1..1077: note = Variant of oxalate decarboxylase from Gemmata sp. SH-PL17
  source 1..1077: mol_type = other DNA
atgggtgaccctacctttatgaacaatgtaccagaccctctgctgtcgggcaaagatttgccgacgttcaagtttgagctggaaaagagctgtggcaaagtcattggggggagttcgggaaaagaagcaaccgttgtccagttacctatctccaaaggcattgctggtgtgagcatggtacttgaaccgggtgcgatgcgcgaattgcactggcatgccacagcagcagagtgggggttcgtattatggggccacgtccgtacgacggtgatcgatccacaaggtctggccgaaaccaacgactttggaccgggcgacgtgtggtattttcctcgcggtcatgggcacatgctggaatgcctgggcgataaaccggcgcatttcattctgatcttcgataacggctacttctcagagtttggcaccttctctattactgactggatcggtcacacaccgaaagcgcttctcgccaagaactttaagctgcccgaaagcgcttttgatgggtttcccaaaaaagaggtctattttgcacgtggcgcggttccaccagccacccctgcagcgcctttacagggactgaagctgccaccactcacgcataaatacgaactcctcgaacaagaacctcataaagtttttaaaggtggtcgtgaatggcgcgtggatagcactcgttttcccatttccaagactgtaaccggcgttgttcttgatttggaacccggcgcgttacgcgagcttcactggcatcctaatgctgacgagtggcaatatgtgatcgatggcaacattagtgtgacgatgttcggttctcatggccgtgtacgcaccgaacagatggagaagggtgatgtcgggtatattccacaggggtatggccacagcatcgaaaatgttggagatcgtccttgtcgcgtcttgattggctttaacacaggtaactaccaagcgatcgacttatcacagtggattgcaggtaatcccgcggatgttcttgccacgaacttctccaaacccaccagcctctttgaaaagttcccaaaacaggacgtgtttattgctcctggcaag

SEQ ID NO: 1442 - protein, 359 aa, synthetic construct
  REGION 1..359: note = Variant of oxalate decarboxylase from Gemmata sp. SH-PL17
MGDPTFMNNVPDPLLSGKDLPTFKFELEKSCGKVIGGSSGKEATVVQLPISKGIAGVSMVLEPGAMRELHWHATAAEWGFVLWGHVRTTVIDPQGLAETNDFGPGDVWYFPRGHGHMLECLGDKPAHFILIFDNGYFSEFGTFSITDWIGHTPKALLAKNFKLPESAFDGFPKKEVYFARGAVPPATPAAPLQGLKLPPLTHKYELLEQEPHKVFKGGREWRVDSTRFPISKTVTGVVLDLEPGALRELHWHPNADEWQYVIDGNISVTMFGSHGRVRTEQMEKGDVGYIPQGYGHSIENVGDRPCRVLIGFNTGNYQAIDLSQWIAGNPADVLATNFSKPTSLFEKFPKQDVFIAPGK

SEQ ID NO: 1443 - DNA, 1077 bp, synthetic construct
  misc_feature 1..1077: note = Variant of oxalate decarboxylase from Gemmata sp. SH-PL17
  source 1..1077: mol_type = other DNA
atgggtgaccctacctttatgaacaatgtaccagaccctctgctgtcgggcaaagatttgccgacgttcaagtttgagctggaaaagagcaagggcaaagtcattggggggagttcgggaaaagaagcaaccgttgtccagttacctatctccaaaggcattgctggtgtgagcatggtacttgaaccgggtgcgatgcgcgaattgcactggcatgccacagcagcagagtggatcttcgtattatggggccacgtccgtacgacggtgatcgatccacaaggtctggccgaaaccaacgactttggaccgggcgacgtgtggtattttcctcgcggtcatgggcacatgctggaatgcctgggcgataaaccggcgcatttcattctgatcttcgataacggctacttctcagagtttggcaccttctctattactgactggatcggtcacacaccgaaagcgcttctcgccaagaactttaagctgcccgaaagcgcttttgatgggtttcccaaaaaagaggtctattttgcacgtggcgcggttccaccagccacccctgcagcgcctttacagggactgaagctgccaccactcacgcataaatacgaactcctcgaacaagaacctcataaagtttttaaaggtggtcgtgaatggcgcgtggatagcactcgttttcccatttccaagactgtaaccggcgttgttcttgatttggaacccggcgcgttacgcgagcttcactggcatcctaatgctgacgagtggcaatatgtgatcgatggcaacattagtgtgacgatgttcggttctcatggccgtgtacgcaccgaacagatggagaagggtgatgtcgggtatattccacaggggtatggccacagcatcgaaaatgttggagatcgtccttgtcgcgtcttgattggctttaacacaggtaactaccaagcgatcgacttatcacagtggattgcaggtaatcccgcggatgttcttgccacgaacttctccaaacccaccagcctctttgaaaagttcccaaaacaggacgtgtttattgctcctggcaag

SEQ ID NO: 1444 - protein, 359 aa, synthetic construct
  REGION 1..359: note = Variant of oxalate decarboxylase from Gemmata sp. SH-PL17
MGDPTFMNNVPDPLLSGKDLPTFKFELEKSKGKVIGGSSGKEATVVQLPISKGIAGVSMVLEPGAMRELHWHATAAEWIFVLWGHVRTTVIDPQGLAETNDFGPGDVWYFPRGHGHMLECLGDKPAHFILIFDNGYFSEFGTFSITDWIGHTPKALLAKNFKLPESAFDGFPKKEVYFARGAVPPATPAAPLQGLKLPPLTHKYELLEQEPHKVFKGGREWRVDSTRFPISKTVTGVVLDLEPGALRELHWHPNADEWQYVIDGNISVTMFGSHGRVRTEQMEKGDVGYIPQGYGHSIENVGDRPCRVLIGFNTGNYQAIDLSQWIAGNPADVLATNFSKPTSLFEKFPKQDVFIAPGK

SEQ ID NO: 1445 - DNA, 1077 bp, synthetic construct
  misc_feature 1..1077: note = Variant of oxalate decarboxylase from Gemmata sp. SH-PL17
  source 1..1077: mol_type = other DNA
atgggtgaccctacctttatgaacaatgtaccagaccctctgctgtcgggcaaagatttgccgacgttcaagtttgagctggaaaagagcaagggcaaagtcattgggattagttcgggaaaagaagcaaccgttgtccagttacctatctccaaaggcattgctggtgtgagcatggtacttgaaccgggtgcgatgcgcgaattgcactggcatgccacagcagcagagtgggggttcgtattatggggccacgtccgtacgacggtgatcgatccacaaggtctggccgaaaccaacgactttggaccgggcgacgtgtggtattttcctcgcggtcatgggcacatgctggaatgcctgggcgataaaccggcgcatttcattctgatcttcgataacggctacttctcagagtttggcaccttctctattactgactggatcggtcacacaccgaaagcgcttctcgccaagaactttaagctgcccgaaagcgcttttgatgggtttcccaaaaaagaggtctattttgcacgtggcgcggttccaccagccacccctgcagcgcctttacagggactgaagctgccaccactcacgcataaatacgaactcctcgaacaagaacctcataaagtttttaaaggtggtcgtgaatggcgcgtggatagcactcgttttcccatttccaagactgtaaccggcgttgttcttgatttggaacccggcgcgttacgcgagcttcactggcatcctaatgctgacgagtggcaatatgtgatcgatggcaacattagtgtgacgatgttcggttctcatggccgtgtacgcaccgaacagatggagaagggtgatgtcgggtatattccacaggggtatggccacagcatcgaaaatgttggagatcgtccttgtcgcgtcttgattggctttaacacaggtaactaccaagcgatcgacttatcacagtggattgcaggtaatcccgcggatgttcttgccacgaacttctccaaacccaccagcctctttgaaaagttcccaaaacaggacgtgtttattgctcctggcaag

SEQ ID NO: 1446 - protein, 359 aa, synthetic construct
  REGION 1..359: note = Variant of oxalate decarboxylase from Gemmata sp. SH-PL17
MGDPTFMNNVPDPLLSGKDLPTFKFELEKSKGKVIGISSGKEATVVQLPISKGIAGVSMVLEPGAMRELHWHATAAEWGFVLWGHVRTTVIDPQGLAETNDFGPGDVWYFPRGHGHMLECLGDKPAHFILIFDNGYFSEFGTFSITDWIGHTPKALLAKNFKLPESAFDGFPKKEVYFARGAVPPATPAAPLQGLKLPPLTHKYELLEQEPHKVFKGGREWRVDSTRFPISKTVTGVVLDLEPGALRELHWHPNADEWQYVIDGNISVTMFGSHGRVRTEQMEKGDVGYIPQGYGHSIENVGDRPCRVLIGFNTGNYQAIDLSQWIAGNPADVLATNFSKPTSLFEKFPKQDVFIAPGK

SEQ ID NO: 1447 - DNA, 1077 bp, synthetic construct
  misc_feature 1..1077: note = Variant of oxalate decarboxylase from Gemmata sp. SH-PL17
  source 1..1077: mol_type = other DNA
atgggtgaccctacctttatgaacaatgtaccagaccctctgctgtcgcaaaaagatttgccgacgttcaagtttgagctggaaaagagcaagggcaaagtcattggggggagttcgggaaaagaagcaaccgttgtccagttacctatctccaaaggcattgctggtgtgagcatggtacttgaaccgggtgcgatgcgcgaattgcactggcatgccacagcagcagagtgggggttcgtattatggggccacgtccgtacgacggtgatcgatccacaaggtctggccgaaaccaacgactttggaccgggcgacgtgtggtattttcctcgcggtcatgggcacatgctggaatgcctgggcgataaaccggcgcatttcattctgatcttcgataacggctacttctcagagtttggcaccttctctattactgactggatcggtcacacaccgaaagcgcttctcgccaagaactttaagctgcccgaaagcgcttttgatgggtttcccaaaaaagaggtctattttgcacgtggcgcggttccaccagccacccctgcagcgcctttacagggactgaagctgccaccactcacgcataaatacgaactcctcgaacaagaacctcataaagtttttaaaggtggtcgtgaatggcgcgtggatagcactcgttttcccatttccaagactgtaaccggcgttgttcttgatttggaacccggcgcgttacgcgagcttcactggcatcctaatgctgacgagtggcaatatgtgatcgatggcaacattagtgtgacgatgttcggttctcatggccgtgtacgcaccgaacagatggagaagggtgatgtcgggtatattccacaggggtatggccacagcatcgaaaatgttggagatcgtccttgtcgcgtcttgattggctttaacacaggtaactaccaagcgatcgacttatcacagtggattgcaggtaatcccgcggatgttcttgccacgaacttctccaaacccaccagcctctttgaaaagttcccaaaacaggacgtgtttattgctcctggcaag

SEQ ID NO: 1448 - protein, 359 aa, synthetic construct
  REGION 1..359: note = Variant of oxalate decarboxylase from Gemmata sp. SH-PL17
MGDPTFMNNVPDPLLSQKDLPTFKFELEKSKGKVIGGSSGKEATVVQLPISKGIAGVSMVLEPGAMRELHWHATAAEWGFVLWGHVRTTVIDPQGLAETNDFGPGDVWYFPRGHGHMLECLGDKPAHFILIFDNGYFSEFGTFSITDWIGHTPKALLAKNFKLPESAFDGFPKKEVYFARGAVPPATPAAPLQGLKLPPLTHKYELLEQEPHKVFKGGREWRVDSTRFPISKTVTGVVLDLEPGALRELHWHPNADEWQYVIDGNISVTMFGSHGRVRTEQMEKGDVGYIPQGYGHSIENVGDRPCRVLIGFNTGNYQAIDLSQWIAGNPADVLATNFSKPTSLFEKFPKQDVFIAPGK

SEQ ID NO: 1449 - DNA, 1077 bp, synthetic construct
  misc_feature 1..1077: note = Variant of oxalate decarboxylase from Gemmata sp. SH-PL17
  source 1..1077: mol_type = other DNA
atgggtgaccctacctttatgaacaatgtaccagaccctctgctgtcgggcaaagatttgccgacgttcaagtttgagctggaaaagagcaacggcaaagtcattggggggagttcgggaaaagaagcaaccgttgtccagttacctatctccaaaggcattgctggtgtgagcatggtacttgaaccgggtgcgatgcgcgaattgcactggcatgccacagcagcagagtgggggttcgtattatggggccacgtccgtacgacggtgatcgatccacaaggtctggccgaaaccaacgactttggaccgggcgacgtgtggtattttcctcgcggtcatgggcacatgctggaatgcctgggcgataaaccggcgcatttcattctgatcttcgataacggctacttctcagagtttggcaccttctctattactgactggatcggtcacacaccgaaagcgcttctcgccaagaactttaagctgcccgaaagcgcttttgatgggtttcccaaaaaagaggtctattttgcacgtggcgcggttccaccagccacccctgcagcgcctttacagggactgaagctgccaccactcacgcataaatacgaactcctcgaacaagaacctcataaagtttttaaaggtggtcgtgaatggcgcgtggatagcactcgttttcccatttccaagactgtaaccggcgttgttcttgatttggaacccggcgcgttacgcgagcttcactggcatcctaatgctgacgagtggcaatatgtgatcgatggcaacattagtgtgacgatgttcggttctcatggccgtgtacgcaccgaacagatggagaagggtgatgtcgggtatattccacaggggtatggccacagcatcgaaaatgttggagatcgtccttgtcgcgtcttgattggctttaacacaggtaactaccaagcgatcgacttatcacagtggattgcaggtaatcccgcggatgttcttgccacgaacttctccaaacccaccagcctctttgaaaagttcccaaaacaggacgtgtttattgctcctggcaag

SEQ ID NO: 1450 - protein, 359 aa, synthetic construct
  REGION 1..359: note = Variant of oxalate decarboxylase from Gemmata sp. SH-PL17
MGDPTFMNNVPDPLLSGKDLPTFKFELEKSNGKVIGGSSGKEATVVQLPISKGIAGVSMVLEPGAMRELHWHATAAEWGFVLWGHVRTTVIDPQGLAETNDFGPGDVWYFPRGHGHMLECLGDKPAHFILIFDNGYFSEFGTFSITDWIGHTPKALLAKNFKLPESAFDGFPKKEVYFARGAVPPATPAAPLQGLKLPPLTHKYELLEQEPHKVFKGGREWRVDSTRFPISKTVTGVVLDLEPGALRELHWHPNADEWQYVIDGNISVTMFGSHGRVRTEQMEKGDVGYIPQGYGHSIENVGDRPCRVLIGFNTGNYQAIDLSQWIAGNPADVLATNFSKPTSLFEKFPKQDVFIAPGK

SEQ ID NO: 1451 - DNA, 1077 bp, synthetic construct
  misc_feature 1..1077: note = Variant of oxalate decarboxylase from Gemmata sp. SH-PL17
  source 1..1077: mol_type = other DNA
atgggtgaccctacctttatgaacaatgtaccagaccctctgctgtcgggcaaagatttgccgacgttcaagtttgagctggaaaagagcaagggcaaagtcattggggggagttcgggaaaagaagcaaccgttgtccagttacctatctccaaaggcattgctggtgtgagcatggtacttgaaccgggtgcgatgcgcgaattgcactggcatgccacagcagcagagtgggggttcgtattatggggccacgtccgtacgacggtgatcgatccacaaggtctggccgaaaccaacgactttggaccgggcgacgtgtggtattttcctcgcggtcatgggcacatgctggaatgcctgggcgataaaccggcgcatttcattctgatcttcgataacggctacttctcagagtttggcaccttctctattactgactggatcggtcacacaccgaaagcgcttctcgccaagaactttaagctgcccgaaagcgcttttgatgggtttcccaaaaaagaggtctattttgcacgtggcgcggttccaccagccacccctgcagcgcctttacagggactgaagctgccaccactcacgcataaatacgaactcctcgaacaagaacctcataaagtttttaaaggtggtcgtgaatggcgcgtggatagcactcgttttcccatttccaagactgtaaccggcgttgttcttgatttggaacccggcgcgttacgcgagcttcactggcatcctaatgctgacgagtggcaatatgtgatcgatggcaacattagtgtgacgatgttcggttctcatggccgtaatcgcaccgaacagatggagaagggtgatgtcgggtatattccacaggggtatggccacagcatcgaaaatgttggagatcgtccttgtcgcgtcttgattggctttaacacaggtaactaccaagcgatcgacttatcacagtggattgcaggtaatcccgcggatgttcttgccacgaacttctccaaacccaccagcctctttgaaaagttcccaaaacaggacgtgtttattgctcctggcaag

SEQ ID NO: 1452 - protein, 359 aa, synthetic construct
  REGION 1..359: note = Variant of oxalate decarboxylase from Gemmata sp. SH-PL17
MGDPTFMNNVPDPLLSGKDLPTFKFELEKSKGKVIGGSSGKEATVVQLPISKGIAGVSMVLEPGAMRELHWHATAAEWGFVLWGHVRTTVIDPQGLAETNDFGPGDVWYFPRGHGHMLECLGDKPAHFILIFDNGYFSEFGTFSITDWIGHTPKALLAKNFKLPESAFDGFPKKEVYFARGAVPPATPAAPLQGLKLPPLTHKYELLEQEPHKVFKGGREWRVDSTRFPISKTVTGVVLDLEPGALRELHWHPNADEWQYVIDGNISVTMFGSHGRNRTEQMEKGDVGYIPQGYGHSIENVGDRPCRVLIGFNTGNYQAIDLSQWIAGNPADVLATNFSKPTSLFEKFPKQDVFIAPGK

SEQ ID NO: 1453 - DNA, 1077 bp, synthetic construct
  misc_feature 1..1077: note = Variant of oxalate decarboxylase from Gemmata sp. SH-PL17
  source 1..1077: mol_type = other DNA
atgggtgaccctacctttatgaacaatgtaccagaccctctgctgtcgggcaaagatttgccgacgttcaagtttgagctggaaaagagcaagggcaaagtcattggggatagttcgggaaaagaagcaaccgttgtccagttacctatctccaaaggcattgctggtgtgagcatggtacttgaaccgggtgcgatgcgcgaattgcactggcatgccacagcagcagagtgggggttcgtattatggggccacgtccgtacgacggtgatcgatccacaaggtctggccgaaaccaacgactttggaccgggcgacgtgtggtattttcctcgcggtcatgggcacatgctggaatgcctgggcgataaaccggcgcatttcattctgatcttcgataacggctacttctcagagtttggcaccttctctattactgactggatcggtcacacaccgaaagcgcttctcgccaagaactttaagctgcccgaaagcgcttttgatgggtttcccaaaaaagaggtctattttgcacgtggcgcggttccaccagccacccctgcagcgcctttacagggactgaagctgccaccactcacgcataaatacgaactcctcgaacaagaacctcataaagtttttaaaggtggtcgtgaatggcgcgtggatagcactcgttttcccatttccaagactgtaaccggcgttgttcttgatttggaacccggcgcgttacgcgagcttcactggcatcctaatgctgacgagtggcaatatgtgatcgatggcaacattagtgtgacgatgttcggttctcatggccgtgtacgcaccgaacagatggagaagggtgatgtcgggtatattccacaggggtatggccacagcatcgaaaatgttggagatcgtccttgtcgcgtcttgattggctttaacacaggtaactaccaagcgatcgacttatcacagtggattgcaggtaatcccgcggatgttcttgccacgaacttctccaaacccaccagcctctttgaaaagttcccaaaacaggacgtgtttattgctcctggcaag

SEQ ID NO: 1454 - protein, 359 aa, synthetic construct
  REGION 1..359: note = Variant of oxalate decarboxylase from Gemmata sp. SH-PL17
MGDPTFMNNVPDPLLSGKDLPTFKFELEKSKGKVIGDSSGKEATVVQLPISKGIAGVSMVLEPGAMRELHWHATAAEWGFVLWGHVRTTVIDPQGLAETNDFGPGDVWYFPRGHGHMLECLGDKPAHFILIFDNGYFSEFGTFSITDWIGHTPKALLAKNFKLPESAFDGFPKKEVYFARGAVPPATPAAPLQGLKLPPLTHKYELLEQEPHKVFKGGREWRVDSTRFPISKTVTGVVLDLEPGALRELHWHPNADEWQYVIDGNISVTMFGSHGRVRTEQMEKGDVGYIPQGYGHSIENVGDRPCRVLIGFNTGNYQAIDLSQWIAGNPADVLATNFSKPTSLFEKFPKQDVFIAPGK

SEQ ID NO: 1455 - DNA, 1077 bp, synthetic construct
  misc_feature 1..1077: note = Variant of oxalate decarboxylase from Gemmata sp. SH-PL17
  source 1..1077: mol_type = other DNA
atgggtgaccctacctttatgaacaatgtaccagaccctctgctgtcgggcaaagatttgccgacgttcaagtttgagctggaaaagagcaagggcaaagtcattggggggagttcgggaaaagaagcaaccgttgtccagttacctatctccaaaggcattgctggtgtgagcatggtacttgaaccgggtgcgatgcgcgaattgcactggcatgccacagcagcagagtgggggttcgtattatggggccacgtccgtacgacggtgatcgatccacaaggtctggccgaaaccaacgactttggaccgggcgacgtgtggtattttcctcgcggtcatgggcacatgctggaatgcctgggcgataaaccggcgcatttcattctgatcttcgataacggctacttctcagagtttggcaccttctctattactgactggatcggtcacacaccgaaagcgcttctcgccaagaactttaagctgcccgaaagcgcttttgatgggtttcccaaaaaagaggtctattttgcacgtggcgcggttccaccagccacccctgcagcgcctttacagggactgaagctgccaccactcacgcataaatacgaactcctcgaacaagaacctcataaagtttttaaaggtggtcgtgaatggcgcgtggatagcactcgttttcccatttccaagactgtaaccggcgttgttcttgatttggaacccggcgcgttacgcgagcttcactggcatcctaatgctgacgagtggcaatatgtgatcgatggcaacattagtgtgacgatgttcggttctcatggccgtcatcgcaccgaacagatggagaagggtgatgtcgggtatattccacaggggtatggccacagcatcgaaaatgttggagatcgtccttgtcgcgtcttgattggctttaacacaggtaactaccaagcgatcgacttatcacagtggattgcaggtaatcccgcggatgttcttgccacgaacttctccaaacccaccagcctctttgaaaagttcccaaaacaggacgtgtttattgctcctggcaag

SEQ ID NO: 1456 - protein, 359 aa, synthetic construct
  REGION 1..359: note = Variant of oxalate decarboxylase from Gemmata sp. SH-PL17
MGDPTFMNNVPDPLLSGKDLPTFKFELEKSKGKVIGGSSGKEATVVQLPISKGIAGVSMVLEPGAMRELHWHATAAEWGFVLWGHVRTTVIDPQGLAETNDFGPGDVWYFPRGHGHMLECLGDKPAHFILIFDNGYFSEFGTFSITDWIGHTPKALLAKNFKLPESAFDGFPKKEVYFARGAVPPATPAAPLQGLKLPPLTHKYELLEQEPHKVFKGGREWRVDSTRFPISKTVTGVVLDLEPGALRELHWHPNADEWQYVIDGNISVTMFGSHGRHRTEQMEKGDVGYIPQGYGHSIENVGDRPCRVLIGFNTGNYQAIDLSQWIAGNPADVLATNFSKPTSLFEKFPKQDVFIAPGK

SEQ ID NO: 1457 - DNA, 1077 bp, synthetic construct
  misc_feature 1..1077: note = Variant of oxalate decarboxylase from Gemmata sp. SH-PL17
  source 1..1077: mol_type = other DNA
atgggtgaccctacctttatgaacaatgtaccagaccctctgctgtcgggcaaagatttgccgacgttcaagtttgagctggaaaagagcaagggcaaagtcattggggggagttcgggaaaagaagcaaccgttgtccagttacctatctccaaaggcattgctggtgtgagcatggtacttgaaccgggtgcgatgcgcgaattgcactggcatgccacagcagcagagtgggggttcgtattatggggccacgtccgtacgacggtgatcgatccacaaggtctggccgaaaccaacgactttggaccgggcgacgtgtggtattttcctcgcggtcatgggcacatgctggaatgcctgggcgataaaccggcgcatttcattctgatcttcgataacggctacttctcagagtttggcaccttctctattactgactggatcggtcacacaccgaaagcgcttctcgccaagaactttaagctgcccgaaagcgcttttgatgggtttcccaaaaaagaggtctattttgcacgtggcgcggttccaccagccacccctgcagcgcctttacagggactgaagctgccaccactcacgcataaatacgaactcctcgaacaagaacctcataaagtttttaaaggtggtcgtgaatggcgcgtggatagcactcgttttcccatttccaagactgtaaccggcgttgttcttgatttggaacccggcgcgttacgcgagcttcactggcatcctaatgctgacgagtggcaatatgtgatcgatggcaacattagtgtgacgatgttcggttctcatggccgtgatcgcaccgaacagatggagaagggtgatgtcgggtatattccacaggggtatggccacagcatcgaaaatgttggagatcgtccttgtcgcgtcttgattggctttaacacaggtaactaccaagcgatcgacttatcacagtggattgcaggtaatcccgcggatgttcttgccacgaacttctccaaacccaccagcctctttgaaaagttcccaaaacaggacgtgtttattgctcctggcaag

SEQ ID NO: 1458 - protein, 359 aa, synthetic construct
  REGION 1..359: note = Variant of oxalate decarboxylase from Gemmata sp. SH-PL17
MGDPTFMNNVPDPLLSGKDLPTFKFELEKSKGKVIGGSSGKEATVVQLPISKGIAGVSMVLEPGAMRELHWHATAAEWGFVLWGHVRTTVIDPQGLAETNDFGPGDVWYFPRGHGHMLECLGDKPAHFILIFDNGYFSEFGTFSITDWIGHTPKALLAKNFKLPESAFDGFPKKEVYFARGAVPPATPAAPLQGLKLPPLTHKYELLEQEPHKVFKGGREWRVDSTRFPISKTVTGVVLDLEPGALRELHWHPNADEWQYVIDGNISVTMFGSHGRDRTEQMEKGDVGYIPQGYGHSIENVGDRPCRVLIGFNTGNYQAIDLSQWIAGNPADVLATNFSKPTSLFEKFPKQDVFIAPGK

SEQ ID NO: 1459 - DNA, 1077 bp, synthetic construct
  misc_feature 1..1077: note = Variant of oxalate decarboxylase from Gemmata sp. SH-PL17
  source 1..1077: mol_type = other DNA
atgggtgaccctacctttatgaacaatgtaccagaccctctgctgtcgggcaaagatttgccgacgttcaagtttgagctggaaaagagcaagggcaaagtcattggggggagttcgggaaaagaagcaaccgttgtccagttacctatctccaaaggcattgctggtgtgagcatggtacttgaaccgggtgcgatgcgcgaattgcactggcatgccacagcagcagagtgggggttcgtattatggggccacgtccgtacgacggtgatcgatccacaaggtgacgccgaaaccaacgactttggaccgggcgacgtgtggtattttcctcgcggtcatgggcacatgctggaatgcctgggcgataaaccggcgcatttcattctgatcttcgataacggctacttctcagagtttggcaccttctctattactgactggatcggtcacacaccgaaagcgcttctcgccaagaactttaagctgcccgaaagcgcttttgatgggtttcccaaaaaagaggtctattttgcacgtggcgcggttccaccagccacccctgcagcgcctttacagggactgaagctgccaccactcacgcataaatacgaactcctcgaacaagaacctcataaagtttttaaaggtggtcgtgaatggcgcgtggatagcactcgttttcccatttccaagactgtaaccggcgttgttcttgatttggaacccggcgcgttacgcgagcttcactggcatcctaatgctgacgagtggcaatatgtgatcgatggcaacattagtgtgacgatgttcggttctcatggccgtgtacgcaccgaacagatggagaagggtgatgtcgggtatattccacaggggtatggccacagcatcgaaaatgttggagatcgtccttgtcgcgtcttgattggctttaacacaggtaactaccaagcgatcgacttatcacagtggattgcaggtaatcccgcggatgttcttgccacgaacttctccaaacccaccagcctctttgaaaagttcccaaaacaggacgtgtttattgctcctggcaag

SEQ ID NO: 1460 - protein, 359 aa, synthetic construct
  REGION 1..359: note = Variant of oxalate decarboxylase from Gemmata sp. SH-PL17
MGDPTFMNNVPDPLLSGKDLPTFKFELEKSKGKVIGGSSGKEATVVQLPISKGIAGVSMVLEPGAMRELHWHATAAEWGFVLWGHVRTTVIDPQGDAETNDFGPGDVWYFPRGHGHMLECLGDKPAHFILIFDNGYFSEFGTFSITDWIGHTPKALLAKNFKLPESAFDGFPKKEVYFARGAVPPATPAAPLQGLKLPPLTHKYELLEQEPHKVFKGGREWRVDSTRFPISKTVTGVVLDLEPGALRELHWHPNADEWQYVIDGNISVTMFGSHGRVRTEQMEKGDVGYIPQGYGHSIENVGDRPCRVLIGFNTGNYQAIDLSQWIAGNPADVLATNFSKPTSLFEKFPKQDVFIAPGK

SEQ ID NO: 1461 - DNA, 1077 bp, synthetic construct
  misc_feature 1..1077: note = Variant of oxalate decarboxylase from Gemmata sp. SH-PL17
  source 1..1077: mol_type = other DNA
atgggtgaccctacctttatgaacaatgtaccagaccctctgctgtcgggcaaagatttgccgacgttcaagtttgagctggaaaagagcaagggcaaagtcattggggggagttcgggaaaagaagcaaccgttgtccagttacctatctccaaaggcattgctggtgtgagcatggtacttgaaccgggtgcgatgcgcgaattgcactggcatgccacagcagcagagtgggggttcgtattatggggccacgtccgtacgacggtgatcgatccacaaggtctggccgaaaccaacgactttggaccgggcgacgtgtggtattttcctcgcggtcatgggcacatgctggaatgcctgggcgataaaccggcgcatttcattctgatcttcgataacggctacttctcagagtttggcaccttctctattactgactggatcggtcacacaccgaaagcgcttctcgccaagaactttaagctgcccgaaagcgcttttgatgggtttcccaaatgtgaggtctattttgcacgtggcgcggttccaccagccacccctgcagcgcctttacagggactgaagctgccaccactcacgcataaatacgaactcctcgaacaagaacctcataaagtttttaaaggtggtcgtgaatggcgcgtggatagcactcgttttcccatttccaagactgtaaccggcgttgttcttgatttggaacccggcgcgttacgcgagcttcactggcatcctaatgctgacgagtggcaatatgtgatcgatggcaacattagtgtgacgatgttcggttctcatggccgtgtacgcaccgaacagatggagaagggtgatgtcgggtatattccacaggggtatggccacagcatcgaaaatgttggagatcgtccttgtcgcgtcttgattggctttaacacaggtaactaccaagcgatcgacttatcacagtggattgcaggtaatcccgcggatgttcttgccacgaacttctccaaacccaccagcctctttgaaaagttcccaaaacaggacgtgtttattgctcctggcaag

SEQ ID NO: 1462 - protein, 359 aa, synthetic construct
  REGION 1..359: note = Variant of oxalate decarboxylase from Gemmata sp. SH-PL17
MGDPTFMNNVPDPLLSGKDLPTFKFELEKSKGKVIGGSSGKEATVVQLPISKGIAGVSMVLEPGAMRELHWHATAAEWGFVLWGHVRTTVIDPQGLAETNDFGPGDVWYFPRGHGHMLECLGDKPAHFILIFDNGYFSEFGTFSITDWIGHTPKALLAKNFKLPESAFDGFPKCEVYFARGAVPPATPAAPLQGLKLPPLTHKYELLEQEPHKVFKGGREWRVDSTRFPISKTVTGVVLDLEPGALRELHWHPNADEWQYVIDGNISVTMFGSHGRVRTEQMEKGDVGYIPQGYGHSIENVGDRPCRVLIGFNTGNYQAIDLSQWIAGNPADVLATNFSKPTSLFEKFPKQDVFIAPGK

SEQ ID NO: 1463 - DNA, 1077 bp, synthetic construct
  misc_feature 1..1077: note = Variant of oxalate decarboxylase from Gemmata sp. SH-PL17
  source 1..1077: mol_type = other DNA
atgggtgaccctacctttatgaacaatgtaccagaccctctgctgtcgggcaaagatttgccgacgttcaagtttgagctggaaaagagcaagggcaaagtcattggggggagttcgggaaaagaagcaaccgttgtccagttacctatctccaaaggcattgctggtgtgagcatggtacttgaaccgggtgcgatgcgcgaattgcactggcatgccacagcagcagagtgggggttcgtattatggggccacgtccgtacgacggtgatcgatccacaaggtctggccgaaaccaacgactttggaccgggcgacgtgtggtattttcctcgcggtcatgggcacatgctggaatgcctgggcgataaaccggcgcatttcattctgatcttcgataacggctacttctcagagtttggcaccttctctattactgactggatcggtcacacaccgaaagcgcttctcgccaagaactttccgctgcccgaaagcgcttttgatgggtttcccaaaaaagaggtctattttgcacgtggcgcggttccaccagccacccctgcagcgcctttacagggactgaagctgccaccactcacgcataaatacgaactcctcgaacaagaacctcataaagtttttaaaggtggtcgtgaatggcgcgtggatagcactcgttttcccatttccaagactgtaaccggcgttgttcttgatttggaacccggcgcgttacgcgagcttcactggcatcctaatgctgacgagtggcaatatgtgatcgatggcaacattagtgtgacgatgttcggttctcatggccgtgtacgcaccgaacagatggagaagggtgatgtcgggtatattccacaggggtatggccacagcatcgaaaatgttggagatcgtccttgtcgcgtcttgattggctttaacacaggtaactaccaagcgatcgacttatcacagtggattgcaggtaatcccgcggatgttcttgccacgaacttctccaaacccaccagcctctttgaaaagttcccaaaacaggacgtgtttattgctcctggcaag

SEQ ID NO: 1464 - protein, 359 aa, synthetic construct
  REGION 1..359: note = Variant of oxalate decarboxylase from Gemmata sp. SH-PL17
MGDPTFMNNVPDPLLSGKDLPTFKFELEKSKGKVIGGSSGKEATVVQLPISKGIAGVSMVLEPGAMRELHWHATAAEWGFVLWGHVRTTVIDPQGLAETNDFGPGDVWYFPRGHGHMLECLGDKPAHFILIFDNGYFSEFGTFSITDWIGHTPKALLAKNFPLPESAFDGFPKKEVYFARGAVPPATPAAPLQGLKLPPLTHKYELLEQEPHKVFKGGREWRVDSTRFPISKTVTGVVLDLEPGALRELHWHPNADEWQYVIDGNISVTMFGSHGRVRTEQMEKGDVGYIPQGYGHSIENVGDRPCRVLIGFNTGNYQAIDLSQWIAGNPADVLATNFSKPTSLFEKFPKQDVFIAPGK

SEQ ID NO: 1465 - DNA, 1077 bp, synthetic construct
  misc_feature 1..1077: note = Variant of oxalate decarboxylase from Gemmata sp. SH-PL17
  source 1..1077: mol_type = other DNA
atgggtgaccctacctttatgaacaatgtaccagaccctctgctgtcgggcaaagatttgccgacgttcaagtttgagctggaaaagagcaagggcaaagtcattggggggagttcgggaaaagaagcaaccgttgtccagttacctatctccaaaggcattgctggtgtgagcatggtacttgaaccgggtgcgatgcgcgaattgcactggcatgccacagcagcagagtgggggttcgtattatggggccacgtccgtacgacggtgatcgatccacaaggtctggccgaaaccaacgactttggaccgggcgacgtgtggtattttcctcgcggtcatgggcacatgctggaatgcctgggcgataaaccggcgcatttcattctgatcttcgataacggctacttctcagagtttggcaccttctctattactgactggatcggtcacacaccgaaagcgcttctcgccaagaactttaagctgcccgaaagcgcttttgatgggtttcccaaaaaagaggtctattttgcacgtggcgcggttccaccagccacccctgcagcgcctttacagggactgaagctgccaccactcacgcataaatacgaactcctcgaacaagaacctcataaagtttttaaaggtggtcgtgaatggcgcgtggatagcactcgttttcccatttccaagactgtaaccggcgttgttcttgatttggaacccggcgcgttacgcgagcttcactggcatcctaatgctgacgagtggcaatatgtgatcgatggcaacattagtgtgacgatgttcggttctcatggccgtgtacgcaccgaacagatggagaagggtgatgtcgggtatattccacaggggtatggccacagcatcgaaaatgttggagatcgtccttgtcgcgtcttgattggctttaacacaggtaactactttgcgatcgacttatcacagtggattgcaggtaatcccgcggatgttcttgccacgaacttctccaaacccaccagcctctttgaaaagttcccaaaacaggacgtgtttattgctcctggcaag

SEQ ID NO: 1466 - protein, 359 aa, synthetic construct
  REGION 1..359: note = Variant of oxalate decarboxylase from Gemmata sp. SH-PL17
MGDPTFMNNVPDPLLSGKDLPTFKFELEKSKGKVIGGSSGKEATVVQLPISKGIAGVSMVLEPGAMRELHWHATAAEWGFVLWGHVRTTVIDPQGLAETNDFGPGDVWYFPRGHGHMLECLGDKPAHFILIFDNGYFSEFGTFSITDWIGHTPKALLAKNFKLPESAFDGFPKKEVYFARGAVPPATPAAPLQGLKLPPLTHKYELLEQEPHKVFKGGREWRVDSTRFPISKTVTGVVLDLEPGALRELHWHPNADEWQYVIDGNISVTMFGSHGRVRTEQMEKGDVGYIPQGYGHSIENVGDRPCRVLIGFNTGNYFAIDLSQWIAGNPADVLATNFSKPTSLFEKFPKQDVFIAPGK

SEQ ID NO: 1467 - DNA, 1077 bp, synthetic construct
  misc_feature 1..1077: note = Variant of oxalate decarboxylase from Gemmata sp. SH-PL17
  source 1..1077: mol_type = other DNA
atgggtgaccctacctttatgaacaatgtaccagaccctctgctgtcgggcaaagatttgccgacgttcaagtttgagctggaaaagagcaagggcaaagtcattggggggagttcgggaaaagaagcaaccgttgtccagttacctatctccaaaggcattgctggtgtgagcatggtacttgaaccgggtgcgatgcgcgaattgcactggcatgccacagcagcagagtgggggttcgtattaaacggccacgtccgtacgacggtgatcgatccacaaggtctggccgaaaccaacgactttggaccgggcgacgtgtggtattttcctcgcggtcatgggcacatgctggaatgcctgggcgataaaccggcgcatttcattctgatcttcgataacggctacttctcagagtttggcaccttctctattactgactggatcggtcacacaccgaaagcgcttctcgccaagaactttaagctgcccgaaagcgcttttgatgggtttcccaaaaaagaggtctattttgcacgtggcgcggttccaccagccacccctgcagcgcctttacagggactgaagctgccaccactcacgcataaatacgaactcctcgaacaagaacctcataaagtttttaaaggtggtcgtgaatggcgcgtggatagcactcgttttcccatttccaagactgtaaccggcgttgttcttgatttggaacccggcgcgttacgcgagcttcactggcatcctaatgctgacgagtggcaatatgtgatcgatggcaacattagtgtgacgatgttcggttctcatggccgtgtacgcaccgaacagatggagaagggtgatgtcgggtatattccacaggggtatggccacagcatcgaaaatgttggagatcgtccttgtcgcgtcttgattggctttaacacaggtaactaccaagcgatcgacttatcacagtggattgcaggtaatcccgcggatgttcttgccacgaacttctccaaacccaccagcctctttgaaaagttcccaaaacaggacgtgtttattgctcctggcaag

SEQ ID NO: 1468 - protein, 359 aa, synthetic construct
  REGION 1..359: note = Variant of oxalate decarboxylase from Gemmata sp. SH-PL17
MGDPTFMNNVPDPLLSGKDLPTFKFELEKSKGKVIGGSSGKEATVVQLPISKGIAGVSMVLEPGAMRELHWHATAAEWGFVLNGHVRTTVIDPQGLAETNDFGPGDVWYFPRGHGHMLECLGDKPAHFILIFDNGYFSEFGTFSITDWIGHTPKALLAKNFKLPESAFDGFPKKEVYFARGAVPPATPAAPLQGLKLPPLTHKYELLEQEPHKVFKGGREWRVDSTRFPISKTVTGVVLDLEPGALRELHWHPNADEWQYVIDGNISVTMFGSHGRVRTEQMEKGDVGYIPQGYGHSIENVGDRPCRVLIGFNTGNYQAIDLSQWIAGNPADVLATNFSKPTSLFEKFPKQDVFIAPGK

SEQ ID NO: 1469 - DNA, 1077 bp, synthetic construct
  misc_feature 1..1077: note = Variant of oxalate decarboxylase from Gemmata sp. SH-PL17
  source 1..1077: mol_type = other DNA
atgggtgaccctacctttatgaacaatgtaccagaccctctgctgtcgggcaaagatttgccgacgttcaagtttgagctggaaaagagcaagggcaaagtcattggggggagttcgggaaaagaagcaaccgttgtccagttacctatctccaaaggcattgctggtgtgagcatgtgccttgaaccgggtgcgatgcgcgaattgcactggcatgccacagcagcagagtgggggttcgtattatggggccacgtccgtacgacggtgatcgatccacaaggtctggccgaaaccaacgactttggaccgggcgacgtgtggtattttcctcgcggtcatgggcacatgctggaatgcctgggcgataaaccggcgcatttcattctgatcttcgataacggctacttctcagagtttggcaccttctctattactgactggatcggtcacacaccgaaagcgcttctcgccaagaactttaagctgcccgaaagcgcttttgatgggtttcccaaaaaagaggtctattttgcacgtggcgcggttccaccagccacccctgcagcgcctttacagggactgaagctgccaccactcacgcataaatacgaactcctcgaacaagaacctcataaagtttttaaaggtggtcgtgaatggcgcgtggatagcactcgttttcccatttccaagactgtaaccggcgttgttcttgatttggaacccggcgcgttacgcgagcttcactggcatcctaatgctgacgagtggcaatatgtgatcgatggcaacattagtgtgacgatgttcggttctcatggccgtgtacgcaccgaacagatggagaagggtgatgtcgggtatattccacaggggtatggccacagcatcgaaaatgttggagatcgtccttgtcgcgtcttgattggctttaacacaggtaactaccaagcgatcgacttatcacagtggattgcaggtaatcccgcggatgttcttgccacgaacttctccaaacccaccagcctctttgaaaagttcccaaaacaggacgtgtttattgctcctggcaag

SEQ ID NO: 1470 - protein, 359 aa, synthetic construct
  REGION 1..359: note = Variant of oxalate decarboxylase from Gemmata sp. SH-PL17
MGDPTFMNNVPDPLLSGKDLPTFKFELEKSKGKVIGGSSGKEATVVQLPISKGIAGVSMCLEPGAMRELHWHATAAEWGFVLWGHVRTTVIDPQGLAETNDFGPGDVWYFPRGHGHMLECLGDKPAHFILIFDNGYFSEFGTFSITDWIGHTPKALLAKNFKLPESAFDGFPKKEVYFARGAVPPATPAAPLQGLKLPPLTHKYELLEQEPHKVFKGGREWRVDSTRFPISKTVTGVVLDLEPGALRELHWHPNADEWQYVIDGNISVTMFGSHGRVRTEQMEKGDVGYIPQGYGHSIENVGDRPCRVLIGFNTGNYQAIDLSQWIAGNPADVLATNFSKPTSLFEKFPKQDVFIAPGK

SEQ ID NO: 1471 - DNA, 1077 bp, synthetic construct
  misc_feature 1..1077: note = Variant of oxalate decarboxylase from Gemmata sp. SH-PL17
  source 1..1077: mol_type = other DNA
atgggtgaccctacctttatgaacaatgtaccagaccctctgctgtcgggcaaagatttgccgacgttcaagtttgagctggaaaagagcaagggcaaagtcattggggggagttcgggaaaagaagcaaccgttgtccagttacctatctccaaaggcattgctggtgtgagcatggtacttgaaccgggtgcgatgcgcgaattgcactggcatgccacagcagcagagtgggggttcgtattaattggccacgtccgtacgacggtgatcgatccacaaggtctggccgaaaccaacgactttggaccgggcgacgtgtggtattttcctcgcggtcatgggcacatgctggaatgcctgggcgataaaccggcgcatttcattctgatcttcgataacggctacttctcagagtttggcaccttctctattactgactggatcggtcacacaccgaaagcgcttctcgccaagaactttaagctgcccgaaagcgcttttgatgggtttcccaaaaaagaggtctattttgcacgtggcgcggttccaccagccacccctgcagcgcctttacagggactgaagctgccaccactcacgcataaatacgaactcctcgaacaagaacctcataaagtttttaaaggtggtcgtgaatggcgcgtggatagcactcgttttcccatttccaagactgtaaccggcgttgttcttgatttggaacccggcgcgttacgcgagcttcactggcatcctaatgctgacgagtggcaatatgtgatcgatggcaacattagtgtgacgatgttcggttctcatggccgtgtacgcaccgaacagatggagaagggtgatgtcgggtatattccacaggggtatggccacagcatcgaaaatgttggagatcgtccttgtcgcgtcttgattggctttaacacaggtaactaccaagcgatcgacttatcacagtggattgcaggtaatcccgcggatgttcttgccacgaacttctccaaacccaccagcctctttgaaaagttcccaaaacaggacgtgtttattgctcctggcaag

SEQ ID NO: 1472 - protein, 359 aa, synthetic construct
  REGION 1..359: note = Variant of oxalate decarboxylase from Gemmata sp. SH-PL17
MGDPTFMNNVPDPLLSGKDLPTFKFELEKSKGKVIGGSSGKEATVVQLPISKGIAGVSMVLEPGAMRELHWHATAAEWGFVLIGHVRTTVIDPQGLAETNDFGPGDVWYFPRGHGHMLECLGDKPAHFILIFDNGYFSEFGTFSITDWIGHTPKALLAKNFKLPESAFDGFPKKEVYFARGAVPPATPAAPLQGLKLPPLTHKYELLEQEPHKVFKGGREWRVDSTRFPISKTVTGVVLDLEPGALRELHWHPNADEWQYVIDGNISVTMFGSHGRVRTEQMEKGDVGYIPQGYGHSIENVGDRPCRVLIGFNTGNYQAIDLSQWIAGNPADVLATNFSKPTSLFEKFPKQDVFIAPGK

SEQ ID NO: 1473 - DNA, 1077 bp, synthetic construct
  misc_feature 1..1077: note = Variant of oxalate decarboxylase from Gemmata sp. SH-PL17
  source 1..1077: mol_type = other DNA
atgggtgaccctacctttatgaacaatgtaccagaccctctgctgtcgggcaaagatttgccgacgttcaagtttgagctggaaaagagcaagggcaaagtcattggggggagttcgggaaaagaagcaaccgttgtccagttacctatctccaaaggcattgctggtgtgagcatggtacttgaaccgggtgcgatgcgcgaattgcactggcatgccacagcagcagagtgggggttcgtattatggggccacgtccgtacgacggtgatcgatccacaaggtctggccgaaaccaacgactttggaccgggcgacgtgtggtattttcctcgcggtcatgggcacatgctggaatgcctgggcgataaaccggcgcatttcattctgatcttcgataacggctacttctcagagtttggcaccttctctattactgactggatcggtcacacaccgaaagcgcttctcgccaagaactttatgctgcccgaaagcgcttttgatgggtttcccaaaaaagaggtctattttgcacgtggcgcggttccaccagccacccctgcagcgcctttacagggactgaagctgccaccactcacgcataaatacgaactcctcgaacaagaacctcataaagtttttaaaggtggtcgtgaatggcgcgtggatagcactcgttttcccatttccaagactgtaaccggcgttgttcttgatttggaacccggcgcgttacgcgagcttcactggcatcctaatgctgacgagtggcaatatgtgatcgatggcaacattagtgtgacgatgttcggttctcatggccgtgtacgcaccgaacagatggagaagggtgatgtcgggtatattccacaggggtatggccacagcatcgaaaatgttggagatcgtccttgtcgcgtcttgattggctttaacacaggtaactaccaagcgatcgacttatcacagtggattgcaggtaatcccgcggatgttcttgccacgaacttctccaaacccaccagcctctttgaaaagttcccaaaacaggacgtgtttattgctcctggcaag

SEQ ID NO: 1474 - protein, 359 aa, synthetic construct
  REGION 1..359: note = Variant of oxalate decarboxylase from Gemmata sp. SH-PL17
MGDPTFMNNVPDPLLSGKDLPTFKFELEKSKGKVIGGSSGKEATVVQLPISKGIAGVSMVLEPGAMRELHWHATAAEWGFVLWGHVRTTVIDPQGLAETNDFGPGDVWYFPRGHGHMLECLGDKPAHFILIFDNGYFSEFGTFSITDWIGHTPKALLAKNFMLPESAFDGFPKKEVYFARGAVPPATPAAPLQGLKLPPLTHKYELLEQEPHKVFKGGREWRVDSTRFPISKTVTGVVLDLEPGALRELHWHPNADEWQYVIDGNISVTMFGSHGRVRTEQMEKGDVGYIPQGYGHSIENVGDRPCRVLIGFNTGNYQAIDLSQWIAGNPADVLATNFSKPTSLFEKFPKQDVFIAPGK

SEQ ID NO: 1475 - DNA, 1077 bp, synthetic construct
  misc_feature 1..1077: note = Variant of oxalate decarboxylase from Gemmata sp. SH-PL17
  source 1..1077: mol_type = other DNA
atgggtgaccctacctttatgaacaatgtaccagaccctctgctgtcgggcaaagatttgccgacgttcaagtttgagctggaaaagagcaagggcaaagtcattggggggagttcgggaaaagaagcaaccgttgtccagttacctatctccaaaggcattgctggtgtgagcatggtacttgaaccgggtgcgatgcgcgaattgcactggcatgccacagcagcagagtgggggttcgtattatggggccacgtccgtacgacggtgatcgatccacaaggtctggccgaaaccaacgactttggaccgggcgacgtgtggtattttcctcgcggtcatgggcacatgctggaatgcctgggcgataaaccggcgcatttcattctgatcttcgataacggctacttctcagagtttggcaccttctctattactgactggatcggtcacacaccgaaagcgcttctcgccaagaactttaagctgcccgaaagcgcttttgatgggtttcccaaaaaagaggtctattttgcacgtggcgcggttccaccagccacccctgcagcgcctttacagggactgaagctgccaccactcacgcataaatacgaactcctcgaacaacatcctcataaagtttttaaaggtggtcgtgaatggcgcgtggatagcactcgttttcccatttccaagactgtaaccggcgttgttcttgatttggaacccggcgcgttacgcgagcttcactggcatcctaatgctgacgagtggcaatatgtgatcgatggcaacattagtgtgacgatgttcggttctcatggccgtgtacgcaccgaacagatggagaagggtgatgtcgggtatattccacaggggtatggccacagcatcgaaaatgttggagatcgtccttgtcgcgtcttgattggctttaacacaggtaactaccaagcgatcgacttatcacagtggattgcaggtaatcccgcggatgttcttgccacgaacttctccaaacccaccagcctctttgaaaagttcccaaaacaggacgtgtttattgctcctggcaag

SEQ ID NO: 1476 - protein, 359 aa, synthetic construct
  REGION 1..359: note = Variant of oxalate decarboxylase from Gemmata sp. SH-PL17
MGDPTFMNNVPDPLLSGKDLPTFKFELEKSKGKVIGGSSGKEATVVQLPISKGIAGVSMVLEPGAMRELHWHATAAEWGFVLWGHVRTTVIDPQGLAETNDFGPGDVWYFPRGHGHMLECLGDKPAHFILIFDNGYFSEFGTFSITDWIGHTPKALLAKNFKLPESAFDGFPKKEVYFARGAVPPATPAAPLQGLKLPPLTHKYELLEQHPHKVFKGGREWRVDSTRFPISKTVTGVVLDLEPGALRELHWHPNADEWQYVIDGNISVTMFGSHGRVRTEQMEKGDVGYIPQGYGHSIENVGDRPCRVLIGFNTGNYQAIDLSQWIAGNPADVLATNFSKPTSLFEKFPKQDVFIAPGK

SEQ ID NO: 1477 - DNA, 1077 bp, synthetic construct
  misc_feature 1..1077: note = Variant of oxalate decarboxylase from Gemmata sp. SH-PL17
  source 1..1077: mol_type = other DNA
atgggtgaccctacctttatgaacaatgtaccagaccctctgctgtcgggcaaagatttgccgacgttcaagtttgagctggaaaagagcaagggcaaagtcattggggggagttcgggaaaagaagcaaccgttgtccagttacctatctccaaaggcattgctggtgtgagcatggtacttgaaccgggtgcgatgcgcgaattgcactggcatgccacagcagcagagtgggggttcgtattatggggccacgtccgtacgacggtgatcgatccacaaggtctggccgaaaccaacgactttggaccgggcgacgtgtggtattttcctcgcggtcatgggcacatgctggaatgcctgggcgataaaccggcgcatttcattctgatcttcgataacggctacttctcagagtttggcaccttctctattactgactggatcggtcacacaccgaaagcgcttctcgccaagaactttaagctgcccgaaagcgcttttgatgggtttcccaaaaaagaggtctattttgcacgtggcgcggttccaccagccacccctgcagcgcctttacagggacataagctgccaccactcacgcataaatacgaactcctcgaacaagaacctcataaagtttttaaaggtggtcgtgaatggcgcgtggatagcactcgttttcccatttccaagactgtaaccggcgttgttcttgatttggaacccggcgcgttacgcgagcttcactggcatcctaatgctgacgagtggcaatatgtgatcgatggcaacattagtgtgacgatgttcggttctcatggccgtgtacgcaccgaacagatggagaagggtgatgtcgggtatattccacaggggtatggccacagcatcgaaaatgttggagatcgtccttgtcgcgtcttgattggctttaacacaggtaactaccaagcgatcgacttatcacagtggattgcaggtaatcccgcggatgttcttgccacgaacttctccaaacccaccagcctctttgaaaagttcccaaaacaggacgtgtttattgctcctggcaag

SEQ ID NO: 1478 - protein, 359 aa, synthetic construct
  REGION 1..359: note = Variant of oxalate decarboxylase from Gemmata sp. SH-PL17
MGDPTFMNNVPDPLLSGKDLPTFKFELEKSKGKVIGGSSGKEATVVQLPISKGIAGVSMVLEPGAMRELHWHATAAEWGFVLWGHVRTTVIDPQGLAETNDFGPGDVWYFPRGHGHMLECLGDKPAHFILIFDNGYFSEFGTFSITDWIGHTPKALLAKNFKLPESAFDGFPKKEVYFARGAVPPATPAAPLQGHKLPPLTHKYELLEQEPHKVFKGGREWRVDSTRFPISKTVTGVVLDLEPGALRELHWHPNADEWQYVIDGNISVTMFGSHGRVRTEQMEKGDVGYIPQGYGHSIENVGDRPCRVLIGFNTGNYQAIDLSQWIAGNPADVLATNFSKPTSLFEKFPKQDVFIAPGK

SEQ ID NO: 1479 - DNA, 1077 bp, synthetic construct
  misc_feature 1..1077: note = Variant of oxalate decarboxylase from Gemmata sp. SH-PL17
  source 1..1077: mol_type = other DNA
atgggtgaccctacctttatgaacaatgtaccagaccctctgctgtcgggcaaagatttgccgacgttcaagtttgagctggaaaagagcaagggcaaagtcattggggggagttcgggaaaagaagcaaccgttgtccagttacctatctccaaaggcattgctggtgtgagcatggtacttgaaccgggtgcgatgcgcgaattgcactggcatgccacagcagcagagtgggggttcgtattatggggccacgtccgtacgacggtgatcgatccacaaggtctggccgaaaccaacgactttggaccgggcgacgtgtggtattttcctcgcggtcatgggcacatgctggaatgcctgggcgataaaccggcgcatttcattctgatcttcgataacggctacttctcagagtttggcaccttctctattactgactggatcggtcacacaccgaaagcgcttctcgccaagaactttaagctgcccgaaagcgcttttgatgggtttcccaaatatgaggtctattttgcacgtggcgcggttccaccagccacccctgcagcgcctttacagggactgaagctgccaccactcacgcataaatacgaactcctcgaacaagaacctcataaagtttttaaaggtggtcgtgaatggcgcgtggatagcactcgttttcccatttccaagactgtaaccggcgttgttcttgatttggaacccggcgcgttacgcgagcttcactggcatcctaatgctgacgagtggcaatatgtgatcgatggcaacattagtgtgacgatgttcggttctcatggccgtgtacgcaccgaacagatggagaagggtgatgtcgggtatattccacaggggtatggccacagcatcgaaaatgttggagatcgtccttgtcgcgtcttgattggctttaacacaggtaactaccaagcgatcgacttatcacagtggattgcaggtaatcccgcggatgttcttgccacgaacttctccaaacccaccagcctctttgaaaagttcccaaaacaggacgtgtttattgctcctggcaag

SEQ ID NO: 1480 - protein, 359 aa, synthetic construct
  REGION 1..359: note = Variant of oxalate decarboxylase from Gemmata sp. SH-PL17
MGDPTFMNNVPDPLLSGKDLPTFKFELEKSKGKVIGGSSGKEATVVQLPISKGIAGVSMVLEPGAMRELHWHATAAEWGFVLWGHVRTTVIDPQGLAETNDFGPGDVWYFPRGHGHMLECLGDKPAHFILIFDNGYFSEFGTFSITDWIGHTPKALLAKNFKLPESAFDGFPKYEVYFARGAVPPATPAAPLQGLKLPPLTHKYELLEQEPHKVFKGGREWRVDSTRFPISKTVTGVVLDLEPGALRELHWHPNADEWQYVIDGNISVTMFGSHGRVRTEQMEKGDVGYIPQGYGHSIENVGDRPCRVLIGFNTGNYQAIDLSQWIAGNPADVLATNFSKPTSLFEKFPKQDVFIAPGK

SEQ ID NO: 1481 - DNA, 1077 bp, synthetic construct
  misc_feature 1..1077: note = Variant of oxalate decarboxylase from Gemmata sp. SH-PL17
  source 1..1077: mol_type = other DNA
atgggtgaccctacctttatgaacaatgtaccagaccctctgctgtcgggcaaagatttgccgacgttcaagtttgagctggaaaagagcaagggcaaagtcattgggtatagttcgggaaaagaagcaaccgttgtccagttacctatctccaaaggcattgctggtgtgagcatggtacttgaaccgggtgcgatgcgcgaattgcactggcatgccacagcagcagagtgggggttcgtattatggggccacgtccgtacgacggtgatcgatccacaaggtctggccgaaaccaacgactttggaccgggcgacgtgtggtattttcctcgcggtcatgggcacatgctggaatgcctgggcgataaaccggcgcatttcattctgatcttcgataacggctacttctcagagtttggcaccttctctattactgactggatcggtcacacaccgaaagcgcttctcgccaagaactttaagctgcccgaaagcgcttttgatgggtttcccaaaaaagaggtctattttgcacgtggcgcggttccaccagccacccctgcagcgcctttacagggactgaagctgccaccactcacgcataaatacgaactcctcgaacaagaacctcataaagtttttaaaggtggtcgtgaatggcgcgtggatagcactcgttttcccatttccaagactgtaaccggcgttgttcttgatttggaacccggcgcgttacgcgagcttcactggcatcctaatgctgacgagtggcaatatgtgatcgatggcaacattagtgtgacgatgttcggttctcatggccgtgtacgcaccgaacagatggagaagggtgatgtcgggtatattccacaggggtatggccacagcatcgaaaatgttggagatcgtccttgtcgcgtcttgattggctttaacacaggtaactaccaagcgatcgacttatcacagtggattgcaggtaatcccgcggatgttcttgccacgaacttctccaaacccaccagcctctttgaaaagttcccaaaacaggacgtgtttattgctcctggcaag

SEQ ID NO: 1482 - protein, 359 aa, synthetic construct
  REGION 1..359: note = Variant of oxalate decarboxylase from Gemmata sp. SH-PL17
MGDPTFMNNVPDPLLSGKDLPTFKFELEKSKGKVIGYSSGKEATVVQLPISKGIAGVSMVLEPGAMRELHWHATAAEWGFVLWGHVRTTVIDPQGLAETNDFGPGDVWYFPRGHGHMLECLGDKPAHFILIFDNGYFSEFGTFSITDWIGHTPKALLAKNFKLPESAFDGFPKKEVYFARGAVPPATPAAPLQGLKLPPLTHKYELLEQEPHKVFKGGREWRVDSTRFPISKTVTGVVLDLEPGALRELHWHPNADEWQYVIDGNISVTMFGSHGRVRTEQMEKGDVGYIPQGYGHSIENVGDRPCRVLIGFNTGNYQAIDLSQWIAGNPADVLATNFSKPTSLFEKFPKQDVFIAPGK

SEQ ID NO: 1483 - DNA, 1077 bp, synthetic construct
  misc_feature 1..1077: note = Variant of oxalate decarboxylase from Gemmata sp. SH-PL17
  source 1..1077: mol_type = other DNA
atgggtgaccctacctttatgaacaatgtaccagaccctctgctgtcgggcaaagatttgccgacgttcaagtttgagctggaaaagagcaagggcaaagtcattggggggagttcgggaaaagaagcaaccgttgtccagttacctatctccaaaggcattgctggtgtgagcatggtacttgaaccgggtgcgatgcgcgaattgcactggcatgccacagcagcagagtgggggttcgtattatggggccacgtccgtacgacggtgatcgatccacaaggtctggccgaaaccaacgactttggaccgggcgacgtgtggtattttcctcgcggtcatgggcacatgctggaatgcctgggcgataaaccggcgcatttcattctgatcttcgataacggctacttctcagagtttggcaccttctctattactgactggatcggtcacacaccgaaagcgcttctcgccaagaactttaagctgcccgaaagcgcttttgatgggtttcccaaaaaagaggtctattttgcacgtggcgcggttccaccagccacccctgcagcgcctttacagggactgaagctgccaccactcacgcataaatacgaactcctcgaacaacagcctcataaagtttttaaaggtggtcgtgaatggcgcgtggatagcactcgttttcccatttccaagactgtaaccggcgttgttcttgatttggaacccggcgcgttacgcgagcttcactggcatcctaatgctgacgagtggcaatatgtgatcgatggcaacattagtgtgacgatgttcggttctcatggccgtgtacgcaccgaacagatggagaagggtgatgtcgggtatattccacaggggtatggccacagcatcgaaaatgttggagatcgtccttgtcgcgtcttgattggctttaacacaggtaactaccaagcgatcgacttatcacagtggattgcaggtaatcccgcggatgttcttgccacgaacttctccaaacccaccagcctctttgaaaagttcccaaaacaggacgtgtttattgctcctggcaag

SEQ ID NO: 1484 - protein, 359 aa, synthetic construct
  REGION 1..359: note = Variant of oxalate decarboxylase from Gemmata sp. SH-PL17
MGDPTFMNNVPDPLLSGKDLPTFKFELEKSKGKVIGGSSGKEATVVQLPISKGIAGVSMVLEPGAMRELHWHATAAEWGFVLWGHVRTTVIDPQGLAETNDFGPGDVWYFPRGHGHMLECLGDKPAHFILIFDNGYFSEFGTFSITDWIGHTPKALLAKNFKLPESAFDGFPKKEVYFARGAVPPATPAAPLQGLKLPPLTHKYELLEQQPHKVFKGGREWRVDSTRFPISKTVTGVVLDLEPGALRELHWHPNADEWQYVIDGNISVTMFGSHGRVRTEQMEKGDVGYIPQGYGHSIENVGDRPCRVLIGFNTGNYQAIDLSQWIAGNPADVLATNFSKPTSLFEKFPKQDVFIAPGK

SEQ ID NO: 1485 - DNA, 1077 bp, synthetic construct
  misc_feature 1..1077: note = Variant of oxalate decarboxylase from Gemmata sp. SH-PL17
  source 1..1077: mol_type = other DNA
atgggtgaccctacctttatgaacaatgtaccagaccctctgctgtcgggcaaagatttgccgacgttcaagtttgagctggaaaagagcaagggcaaagtcattgggaccagttcgggaaaagaagcaaccgttgtccagttacctatctccaaaggcattgctggtgtgagcatggtacttgaaccgggtgcgatgcgcgaattgcactggcatgccacagcagcagagtgggggttcgtattatggggccacgtccgtacgacggtgatcgatccacaaggtctggccgaaaccaacgactttggaccgggcgacgtgtggtattttcctcgcggtcatgggcacatgctggaatgcctgggcgataaaccggcgcatttcattctgatcttcgataacggctacttctcagagtttggcaccttctctattactgactggatcggtcacacaccgaaagcgcttctcgccaagaactttaagctgcccgaaagcgcttttgatgggtttcccaaaaaagaggtctattttgcacgtggcgcggttccaccagccacccctgcagcgcctttacagggactgaagctgccaccactcacgcataaatacgaactcctcgaacaagaacctcataaagtttttaaaggtggtcgtgaatggcgcgtggatagcactcgttttcccatttccaagactgtaaccggcgttgttcttgatttggaacccggcgcgttacgcgagcttcactggcatcctaatgctgacgagtggcaatatgtgatcgatggcaacattagtgtgacgatgttcggttctcatggccgtgtacgcaccgaacagatggagaagggtgatgtcgggtatattccacaggggtatggccacagcatcgaaaatgttggagatcgtccttgtcgcgtcttgattggctttaacacaggtaactaccaagcgatcgacttatcacagtggattgcaggtaatcccgcggatgttcttgccacgaacttctccaaacccaccagcctctttgaaaagttcccaaaacaggacgtgtttattgctcctggcaag

SEQ ID NO: 1486 - protein, 359 aa, synthetic construct
  REGION 1..359: note = Variant of oxalate decarboxylase from Gemmata sp. SH-PL17
MGDPTFMNNVPDPLLSGKDLPTFKFELEKSKGKVIGTSSGKEATVVQLPISKGIAGVSMVLEPGAMRELHWHATAAEWGFVLWGHVRTTVIDPQGLAETNDFGPGDVWYFPRGHGHMLECLGDKPAHFILIFDNGYFSEFGTFSITDWIGHTPKALLAKNFKLPESAFDGFPKKEVYFARGAVPPATPAAPLQGLKLPPLTHKYELLEQEPHKVFKGGREWRVDSTRFPISKTVTGVVLDLEPGALRELHWHPNADEWQYVIDGNISVTMFGSHGRVRTEQMEKGDVGYIPQGYGHSIENVGDRPCRVLIGFNTGNYQAIDLSQWIAGNPADVLATNFSKPTSLFEKFPKQDVFIAPGK

SEQ ID NO: 1487 - DNA, 1077 bp, synthetic construct
  misc_feature 1..1077: note = Variant of oxalate decarboxylase from Gemmata sp. SH-PL17
  source 1..1077: mol_type = other DNA
atgggtgaccctacctttatgaacaatgtaccagaccctctgctgtcgggcaaagatttgccgacgttcaagtttgagctggaaaagagcaagggcaaagtcattggggggagttcgggaaaagaagcaaccgttgtccagttacctatctccaaaggcattgctggtgtgagcatggtacttgaaccgggtgcgatgcgcgaattgcactggcatgccacagcagcagagtgggggttcgtattatggggccacgtccgtacgacggtgatcgatccacaaggtaatgccgaaaccaacgactttggaccgggcgacgtgtggtattttcctcgcggtcatgggcacatgctggaatgcctgggcgataaaccggcgcatttcattctgatcttcgataacggctacttctcagagtttggcaccttctctattactgactggatcggtcacacaccgaaagcgcttctcgccaagaactttaagctgcccgaaagcgcttttgatgggtttcccaaaaaagaggtctattttgcacgtggcgcggttccaccagccacccctgcagcgcctttacagggactgaagctgccaccactcacgcataaatacgaactcctcgaacaagaacctcataaagtttttaaaggtggtcgtgaatggcgcgtggatagcactcgttttcccatttccaagactgtaaccggcgttgttcttgatttggaacccggcgcgttacgcgagcttcactggcatcctaatgctgacgagtggcaatatgtgatcgatggcaacattagtgtgacgatgttcggttctcatggccgtgtacgcaccgaacagatggagaagggtgatgtcgggtatattccacaggggtatggccacagcatcgaaaatgttggagatcgtccttgtcgcgtcttgattggctttaacacaggtaactaccaagcgatcgacttatcacagtggattgcaggtaatcccgcggatgttcttgccacgaacttctccaaacccaccagcctctttgaaaagttcccaaaacaggacgtgtttattgctcctggcaag

SEQ ID NO: 1488 - protein, 359 aa, synthetic construct
  REGION 1..359: note = Variant of oxalate decarboxylase from Gemmata sp. SH-PL17
MGDPTFMNNVPDPLLSGKDLPTFKFELEKSKGKVIGGSSGKEATVVQLPISKGIAGVSMVLEPGAMRELHWHATAAEWGFVLWGHVRTTVIDPQGNAETNDFGPGDVWYFPRGHGHMLECLGDKPAHFILIFDNGYFSEFGTFSITDWIGHTPKALLAKNFKLPESAFDGFPKKEVYFARGAVPPATPAAPLQGLKLPPLTHKYELLEQEPHKVFKGGREWRVDSTRFPISKTVTGVVLDLEPGALRELHWHPNADEWQYVIDGNISVTMFGSHGRVRTEQMEKGDVGYIPQGYGHSIENVGDRPCRVLIGFNTGNYQAIDLSQWIAGNPADVLATNFSKPTSLFEKFPKQDVFIAPGK

SEQ ID NO: 1489 - DNA, 1077 bp, synthetic construct
  misc_feature 1..1077: note = Variant of oxalate decarboxylase from Gemmata sp. SH-PL17
  source 1..1077: mol_type = other DNA
atgggtgaccctacctttatgaacaatgtaccagaccctctgctgtcgggcaaagatttgccgacgttcaagtttgagctggaaaagagcaagggcaaagtcattggggggagttcgggaaaagaagcaaccgttgtccagttacctatctccaaaggcattgctggtgtgagcatggtacttgaaccgggtgcgatgcgcgaattgcactggcatgccacagcagcagagtgggggttcgtattacacggccacgtccgtacgacggtgatcgatccacaaggtctggccgaaaccaacgactttggaccgggcgacgtgtggtattttcctcgcggtcatgggcacatgctggaatgcctgggcgataaaccggcgcatttcattctgatcttcgataacggctacttctcagagtttggcaccttctctattactgactggatcggtcacacaccgaaagcgcttctcgccaagaactttaagctgcccgaaagcgcttttgatgggtttcccaaaaaagaggtctattttgcacgtggcgcggttccaccagccacccctgcagcgcctttacagggactgaagctgccaccactcacgcataaatacgaactcctcgaacaagaacctcataaagtttttaaaggtggtcgtgaatggcgcgtggatagcactcgttttcccatttccaagactgtaaccggcgttgttcttgatttggaacccggcgcgttacgcgagcttcactggcatcctaatgctgacgagtggcaatatgtgatcgatggcaacattagtgtgacgatgttcggttctcatggccgtgtacgcaccgaacagatggagaagggtgatgtcgggtatattccacaggggtatggccacagcatcgaaaatgttggagatcgtccttgtcgcgtcttgattggctttaacacaggtaactaccaagcgatcgacttatcacagtggattgcaggtaatcccgcggatgttcttgccacgaacttctccaaacccaccagcctctttgaaaagttcccaaaacaggacgtgtttattgctcctggcaag

SEQ ID NO: 1490 - protein, 359 aa, synthetic construct
  REGION 1..359: note = Variant of oxalate decarboxylase from Gemmata sp. SH-PL17
MGDPTFMNNVPDPLLSGKDLPTFKFELEKSKGKVIGGSSGKEATVVQLPISKGIAGVSMVLEPGAMRELHWHATAAEWGFVLHGHVRTTVIDPQGLAETNDFGPGDVWYFPRGHGHMLECLGDKPAHFILIFDNGYFSEFGTFSITDWIGHTPKALLAKNFKLPESAFDGFPKKEVYFARGAVPPATPAAPLQGLKLPPLTHKYELLEQEPHKVFKGGREWRVDSTRFPISKTVTGVVLDLEPGALRELHWHPNADEWQYVIDGNISVTMFGSHGRVRTEQMEKGDVGYIPQGYGHSIENVGDRPCRVLIGFNTGNYQAIDLSQWIAGNPADVLATNFSKPTSLFEKFPKQDVFIAPGK

SEQ ID NO: 1491 - DNA, 1077 bp, synthetic construct
  misc_feature 1..1077: note = Variant of oxalate decarboxylase from Gemmata sp. SH-PL17
  source 1..1077: mol_type = other DNA
atgggtgaccctacctttatgaacaatgtaccagaccctctgctgcacggcaaagatttgccgacgttcaagtttgagctggaaaagagcaagggcaaagtcattggggggagttcgggaaaagaagcaaccgttgtccagttacctatctccaaaggcattgctggtgtgagcatggtacttgaaccgggtgcgatgcgcgaattgcactggcatgccacagcagcagagtgggggttcgtattatggggccacgtccgtacgacggtgatcgatccacaaggtctggccgaaaccaacgactttggaccgggcgacgtgtggtattttcctcgcggtcatgggcacatgctggaatgcctgggcgataaaccggcgcatttcattctgatcttcgataacggctacttctcagagtttggcaccttctctattactgactggatcggtcacacaccgaaagcgcttctcgccaagaactttaagctgcccgaaagcgcttttgatgggtttcccaaaaaagaggtctattttgcacgtggcgcggttccaccagccacccctgcagcgcctttacagggactgaagctgccaccactcacgcataaatacgaactcctcgaacaagaacctcataaagtttttaaaggtggtcgtgaatggcgcgtggatagcactcgttttcccatttccaagactgtaaccggcgttgttcttgatttggaacccggcgcgttacgcgagcttcactggcatcctaatgctgacgagtggcaatatgtgatcgatggcaacattagtgtgacgatgttcggttctcatggccgtgtacgcaccgaacagatggagaagggtgatgtcgggtatattccacaggggtatggccacagcatcgaaaatgttggagatcgtccttgtcgcgtcttgattggctttaacacaggtaactaccaagcgatcgacttatcacagtggattgcaggtaatcccgcggatgttcttgccacgaacttctccaaacccaccagcctctttgaaaagttcccaaaacaggacgtgtttattgctcctggcaag

SEQ ID NO: 1492 - protein, 359 aa, synthetic construct
  REGION 1..359: note = Variant of oxalate decarboxylase from Gemmata sp. SH-PL17
MGDPTFMNNVPDPLLHGKDLPTFKFELEKSKGKVIGGSSGKEATVVQLPISKGIAGVSMVLEPGAMRELHWHATAAEWGFVLWGHVRTTVIDPQGLAETNDFGPGDVWYFPRGHGHMLECLGDKPAHFILIFDNGYFSEFGTFSITDWIGHTPKALLAKNFKLPESAFDGFPKKEVYFARGAVPPATPAAPLQGLKLPPLTHKYELLEQEPHKVFKGGREWRVDSTRFPISKTVTGVVLDLEPGALRELHWHPNADEWQYVIDGNISVTMFGSHGRVRTEQMEKGDVGYIPQGYGHSIENVGDRPCRVLIGFNTGNYQAIDLSQWIAGNPADVLATNFSKPTSLFEKFPKQDVFIAPGK

SEQ ID NO: 1493 - DNA, 1077 bp, synthetic construct
  misc_feature 1..1077: note = Variant of oxalate decarboxylase from Gemmata sp. SH-PL17
  source 1..1077: mol_type = other DNA
atgggtgaccctacctttatgaacaatgtaccagaccctctgctgtcgggcaaagatttgccgacgttcaagtttgagctggaaaagagcaagggcaaagtcattggggggagttcgggaaaagaagcaaccgttgtccagttacctatctccaaaggcattgctggtgtgagcatggtacttgaaccgggtgcgatgcgcgaattgcactggcatgccacagcagcagagtgggggttcgtattatggggccacgtccgtacgacggtgatcgatccacaaggtctggccgaaaccaacgactttggaccgggcgacgtgtggtattttcctcgcggtcatgggcacatgctggaatgcctgggcgataaaccggcgcatttcattctgatcttcgataacggctacttctcagagtttggcaccttctctattactgactggatcggtcacacaccgaaagcgcttctcgccaagaactttaagctgcccgaaagcgcttttgatgggtttcccaaattcgaggtctattttgcacgtggcgcggttccaccagccacccctgcagcgcctttacagggactgaagctgccaccactcacgcataaatacgaactcctcgaacaagaacctcataaagtttttaaaggtggtcgtgaatggcgcgtggatagcactcgttttcccatttccaagactgtaaccggcgttgttcttgatttggaacccggcgcgttacgcgagcttcactggcatcctaatgctgacgagtggcaatatgtgatcgatggcaacattagtgtgacgatgttcggttctcatggccgtgtacgcaccgaacagatggagaagggtgatgtcgggtatattccacaggggtatggccacagcatcgaaaatgttggagatcgtccttgtcgcgtcttgattggctttaacacaggtaactaccaagcgatcgacttatcacagtggattgcaggtaatcccgcggatgttcttgccacgaacttctccaaacccaccagcctctttgaaaagttcccaaaacaggacgtgtttattgctcctggcaag

SEQ ID NO: 1494 - protein, 359 aa, synthetic construct
  REGION 1..359: note = Variant of oxalate decarboxylase from Gemmata sp. SH-PL17
MGDPTFMNNVPDPLLSGKDLPTFKFELEKSKGKVIGGSSGKEATVVQLPISKGIAGVSMVLEPGAMRELHWHATAAEWGFVLWGHVRTTVIDPQGLAETNDFGPGDVWYFPRGHGHMLECLGDKPAHFILIFDNGYFSEFGTFSITDWIGHTPKALLAKNFKLPESAFDGFPKFEVYFARGAVPPATPAAPLQGLKLPPLTHKYELLEQEPHKVFKGGREWRVDSTRFPISKTVTGVVLDLEPGALRELHWHPNADEWQYVIDGNISVTMFGSHGRVRTEQMEKGDVGYIPQGYGHSIENVGDRPCRVLIGFNTGNYQAIDLSQWIAGNPADVLATNFSKPTSLFEKFPKQDVFIAPGK

SEQ ID NO: 1495 - DNA, 1077 bp, synthetic construct
  misc_feature 1..1077: note = Variant of oxalate decarboxylase from Gemmata sp. SH-PL17
  source 1..1077: mol_type = other DNA
atgggtgaccctacctttatgaacaatgtaccagaccctctgctgtcgggcaaagatttgccgacgttcaagtttgagctggaaaagagcaagggcaaagtcattggggggagttcgggaaaagaagcaaccgttgtccagttacctatctccaaaggcattgctggtgtgagcatggtacttgaaccgggtgcgatgcgcgaattgcactggcatgccacagcagcagagtgggggttcgtattagacggccacgtccgtacgacggtgatcgatccacaaggtctggccgaaaccaacgactttggaccgggcgacgtgtggtattttcctcgcggtcatgggcacatgctggaatgcctgggcgataaaccggcgcatttcattctgatcttcgataacggctacttctcagagtttggcaccttctctattactgactggatcggtcacacaccgaaagcgcttctcgccaagaactttaagctgcccgaaagcgcttttgatgggtttcccaaaaaagaggtctattttgcacgtggcgcggttccaccagccacccctgcagcgcctttacagggactgaagctgccaccactcacgcataaatacgaactcctcgaacaagaacctcataaagtttttaaaggtggtcgtgaatggcgcgtggatagcactcgttttcccatttccaagactgtaaccggcgttgttcttgatttggaacccggcgcgttacgcgagcttcactggcatcctaatgctgacgagtggcaatatgtgatcgatggcaacattagtgtgacgatgttcggttctcatggccgtgtacgcaccgaacagatggagaagggtgatgtcgggtatattccacaggggtatggccacagcatcgaaaatgttggagatcgtccttgtcgcgtcttgattggctttaacacaggtaactaccaagcgatcgacttatcacagtggattgcaggtaatcccgcggatgttcttgccacgaacttctccaaacccaccagcctctttgaaaagttcccaaaacaggacgtgtttattgctcctggcaag

SEQ ID NO: 1496 - protein, 359 aa, synthetic construct
  REGION 1..359: note = Variant of oxalate decarboxylase from Gemmata sp. SH-PL17
MGDPTFMNNVPDPLLSGKDLPTFKFELEKSKGKVIGGSSGKEATVVQLPISKGIAGVSMVLEPGAMRELHWHATAAEWGFVLDGHVRTTVIDPQGLAETNDFGPGDVWYFPRGHGHMLECLGDKPAHFILIFDNGYFSEFGTFSITDWIGHTPKALLAKNFKLPESAFDGFPKKEVYFARGAVPPATPAAPLQGLKLPPLTHKYELLEQEPHKVFKGGREWRVDSTRFPISKTVTGVVLDLEPGALRELHWHPNADEWQYVIDGNISVTMFGSHGRVRTEQMEKGDVGYIPQGYGHSIENVGDRPCRVLIGFNTGNYQAIDLSQWIAGNPADVLATNFSKPTSLFEKFPKQDVFIAPGK

SEQ ID NO: 1497 - DNA, 1077 bp, synthetic construct
  misc_feature 1..1077: note = Variant of oxalate decarboxylase from Gemmata sp. SH-PL17
  source 1..1077: mol_type = other DNA
atgggtgaccctacctttatgaacaatgtaccagaccctctgctgtcgggcaaagatttgccgacgttcaagtttgagctggaaaagagcaagggcaaagtcattggggggagttcgggaaaagaagcaaccgttgtccagttacctatctccaaaggcattgctggtgtgagcatggtacttgaaccgggtgcgatgcgcgaattgcactggcatgccacagcagcagagtgggggttcgtattacaaggccacgtccgtacgacggtgatcgatccacaaggtctggccgaaaccaacgactttggaccgggcgacgtgtggtattttcctcgcggtcatgggcacatgctggaatgcctgggcgataaaccggcgcatttcattctgatcttcgataacggctacttctcagagtttggcaccttctctattactgactggatcggtcacacaccgaaagcgcttctcgccaagaactttaagctgcccgaaagcgcttttgatgggtttcccaaaaaagaggtctattttgcacgtggcgcggttccaccagccacccctgcagcgcctttacagggactgaagctgccaccactcacgcataaatacgaactcctcgaacaagaacctcataaagtttttaaaggtggtcgtgaatggcgcgtggatagcactcgttttcccatttccaagactgtaaccggcgttgttcttgatttggaacccggcgcgttacgcgagcttcactggcatcctaatgctgacgagtggcaatatgtgatcgatggcaacattagtgtgacgatgttcggttctcatggccgtgtacgcaccgaacagatggagaagggtgatgtcgggtatattccacaggggtatggccacagcatcgaaaatgttggagatcgtccttgtcgcgtcttgattggctttaacacaggtaactaccaagcgatcgacttatcacagtggattgcaggtaatcccgcggatgttcttgccacgaacttctccaaacccaccagcctctttgaaaagttcccaaaacaggacgtgtttattgctcctggcaag

SEQ ID NO: 1498 - protein, 359 aa, synthetic construct
  REGION 1..359: note = Variant of oxalate decarboxylase from Gemmata sp. SH-PL17
MGDPTFMNNVPDPLLSGKDLPTFKFELEKSKGKVIGGSSGKEATVVQLPISKGIAGVSMVLEPGAMRELHWHATAAEWGFVLQGHVRTTVIDPQGLAETNDFGPGDVWYFPRGHGHMLECLGDKPAHFILIFDNGYFSEFGTFSITDWIGHTPKALLAKNFKLPESAFDGFPKKEVYFARGAVPPATPAAPLQGLKLPPLTHKYELLEQEPHKVFKGGREWRVDSTRFPISKTVTGVVLDLEPGALRELHWHPNADEWQYVIDGNISVTMFGSHGRVRTEQMEKGDVGYIPQGYGHSIENVGDRPCRVLIGFNTGNYQAIDLSQWIAGNPADVLATNFSKPTSLFEKFPKQDVFIAPGK

SEQ ID NO: 1499 - DNA, 1077 bp, synthetic construct
  misc_feature 1..1077: note = Variant of oxalate decarboxylase from Gemmata sp. SH-PL17
  source 1..1077: mol_type = other DNA
atgggtgaccctacctttatgaacaatgtaccagaccctctgctgtcgggcaaagatttgccgacgttcaagtttgagctggaaaagagcaagggcaaagtcattggggggagttcgggaaaagaagcaaccgttgtccagttacctatctccaaaggcattgctggtgtgagcatggtacttgaaccgggtgcgatgcgcgaattgcactggcatgccacagcagcagagtgggggttcgtattatggggccacgtccgtacgacggtgatcgatccacaaggtctggccgaaaccaacgactttggaccgggcgacgtgtggtattttcctcgcggtcatgggcacatgctggaatgcctgggcgataaaccggcgcatttcattctgatcttcgataacggctacttctcagagtttggcaccttctctattactgactggatcggtcacacaccgaaagcgcttctcgccaagaactttcatctgcccgaaagcgcttttgatgggtttcccaaaaaagaggtctattttgcacgtggcgcggttccaccagccacccctgcagcgcctttacagggactgaagctgccaccactcacgcataaatacgaactcctcgaacaagaacctcataaagtttttaaaggtggtcgtgaatggcgcgtggatagcactcgttttcccatttccaagactgtaaccggcgttgttcttgatttggaacccggcgcgttacgcgagcttcactggcatcctaatgctgacgagtggcaatatgtgatcgatggcaacattagtgtgacgatgttcggttctcatggccgtgtacgcaccgaacagatggagaagggtgatgtcgggtatattccacaggggtatggccacagcatcgaaaatgttggagatcgtccttgtcgcgtcttgattggctttaacacaggtaactaccaagcgatcgacttatcacagtggattgcaggtaatcccgcggatgttcttgccacgaacttctccaaacccaccagcctctttgaaaagttcccaaaacaggacgtgtttattgctcctggcaag

SEQ ID NO: 1500 - protein, 359 aa, synthetic construct
  REGION 1..359: note = Variant of oxalate decarboxylase from Gemmata sp. SH-PL17
MGDPTFMNNVPDPLLSGKDLPTFKFELEKSKGKVIGGSSGKEATVVQLPISKGIAGVSMVLEPGAMRELHWHATAAEWGFVLWGHVRTTVIDPQGLAETNDFGPGDVWYFPRGHGHMLECLGDKPAHFILIFDNGYFSEFGTFSITDWIGHTPKALLAKNFHLPESAFDGFPKKEVYFARGAVPPATPAAPLQGLKLPPLTHKYELLEQEPHKVFKGGREWRVDSTRFPISKTVTGVVLDLEPGALRELHWHPNADEWQYVIDGNISVTMFGSHGRVRTEQMEKGDVGYIPQGYGHSIENVGDRPCRVLIGFNTGNYQAIDLSQWIAGNPADVLATNFSKPTSLFEKFPKQDVFIAPGK

SEQ ID NO: 1501 - DNA, 1077 bp, synthetic construct
  misc_feature 1..1077: note = Variant of oxalate decarboxylase from Gemmata sp. SH-PL17
  source 1..1077: mol_type = other DNA
atgggtgaccctacctttatgaacaatgtaccagaccctctgctgtcgggcaaagatttgccgacgttcaagtttgagctggaaaagagcaagggcaaagtcattggggggagttcgggaaaagaagcaaccgttgtccagttacctatctccaaaggcattgctggtgtgagcatggtacttgaaccgggtgcgatgcgcgaattgcactggcatgccacagcagcagagtgggggttcgtattatggggccacgtccgtacgacggtgatcgatccacaaggtctggccgaaaccaacgactttggaccgggcgacgtgtggtattttcctcgcggtcatgggcacatgctggaatgcctgggcgataaaccggcgcatttcattctgatcttcgataacggctacttctcagagtttggcaccttctctattactgactggatcggtcacacaccgaaagcgcttctcgccaagaacttttggctgcccgaaagcgcttttgatgggtttcccaaaaaagaggtctattttgcacgtggcgcggttccaccagccacccctgcagcgcctttacagggactgaagctgccaccactcacgcataaatacgaactcctcgaacaagaacctcataaagtttttaaaggtggtcgtgaatggcgcgtggatagcactcgttttcccatttccaagactgtaaccggcgttgttcttgatttggaacccggcgcgttacgcgagcttcactggcatcctaatgctgacgagtggcaatatgtgatcgatggcaacattagtgtgacgatgttcggttctcatggccgtgtacgcaccgaacagatggagaagggtgatgtcgggtatattccacaggggtatggccacagcatcgaaaatgttggagatcgtccttgtcgcgtcttgattggctttaacacaggtaactaccaagcgatcgacttatcacagtggattgcaggtaatcccgcggatgttcttgccacgaacttctccaaacccaccagcctctttgaaaagttcccaaaacaggacgtgtttattgctcctggcaag

SEQ ID NO: 1502 - protein, 359 aa, synthetic construct
  REGION 1..359: note = Variant of oxalate decarboxylase from Gemmata sp. SH-PL17
MGDPTFMNNVPDPLLSGKDLPTFKFELEKSKGKVIGGSSGKEATVVQLPISKGIAGVSMVLEPGAMRELHWHATAAEWGFVLWGHVRTTVIDPQGLAETNDFGPGDVWYFPRGHGHMLECLGDKPAHFILIFDNGYFSEFGTFSITDWIGHTPKALLAKNFWLPESAFDGFPKKEVYFARGAVPPATPAAPLQGLKLPPLTHKYELLEQEPHKVFKGGREWRVDSTRFPISKTVTGVVLDLEPGALRELHWHPNADEWQYVIDGNISVTMFGSHGRVRTEQMEKGDVGYIPQGYGHSIENVGDRPCRVLIGFNTGNYQAIDLSQWIAGNPADVLATNFSKPTSLFEKFPKQDVFIAPGK

SEQ ID NO: 1503 - DNA, 1077 bp, synthetic construct
  misc_feature 1..1077: note = Variant of oxalate decarboxylase from Gemmata sp. SH-PL17
  source 1..1077: mol_type = other DNA
atgggtgaccctacctttatgaacaatgtaccagaccctctgctgtcgggcaaagatttgccgacgttcaagtttgagctggaaaagagcaagggcaaagtcattggggggagttcgggaaaagaagcaaccgttgtccagttacctatctccaaaggcattgctggtgtgagcatggtacttgaaccgggtgcgatgcgcgaattgcactggcatgccacagcagcagagtgggggttcgtattatggggccacgtccgtacgacggtgatcgatccacaaggtctggccgaaaccaacgactttggaccgggcgacgtgtggtattttcctcgcggtcatgggcacatgctggaatgcctgggcgataaaccggcgcatttcattctgatcttcgataacggctacttctcagagtttggcaccttctctattactgactggatcggtcacacaccgaaagcgcttctcgccaagaactttaacctgcccgaaagcgcttttgatgggtttcccaaaaaagaggtctattttgcacgtggcgcggttccaccagccacccctgcagcgcctttacagggactgaagctgccaccactcacgcataaatacgaactcctcgaacaagaacctcataaagtttttaaaggtggtcgtgaatggcgcgtggatagcactcgttttcccatttccaagactgtaaccggcgttgttcttgatttggaacccggcgcgttacgcgagcttcactggcatcctaatgctgacgagtggcaatatgtgatcgatggcaacattagtgtgacgatgttcggttctcatggccgtgtacgcaccgaacagatggagaagggtgatgtcgggtatattccacaggggtatggccacagcatcgaaaatgttggagatcgtccttgtcgcgtcttgattggctttaacacaggtaactaccaagcgatcgacttatcacagtggattgcaggtaatcccgcggatgttcttgccacgaacttctccaaacccaccagcctctttgaaaagttcccaaaacaggacgtgtttattgctcctggcaag

SEQ ID NO: 1504 - protein, 359 aa, synthetic construct
  REGION 1..359: note = Variant of oxalate decarboxylase from Gemmata sp. SH-PL17
MGDPTFMNNVPDPLLSGKDLPTFKFELEKSKGKVIGGSSGKEATVVQLPISKGIAGVSMVLEPGAMRELHWHATAAEWGFVLWGHVRTTVIDPQGLAETNDFGPGDVWYFPRGHGHMLECLGDKPAHFILIFDNGYFSEFGTFSITDWIGHTPKALLAKNFNLPESAFDGFPKKEVYFARGAVPPATPAAPLQGLKLPPLTHKYELLEQEPHKVFKGGREWRVDSTRFPISKTVTGVVLDLEPGALRELHWHPNADEWQYVIDGNISVTMFGSHGRVRTEQMEKGDVGYIPQGYGHSIENVGDRPCRVLIGFNTGNYQAIDLSQWIAGNPADVLATNFSKPTSLFEKFPKQDVFIAPGK

SEQ ID NO: 1505 - DNA, 1077 bp, synthetic construct
  misc_feature 1..1077: note = Variant of oxalate decarboxylase from Gemmata sp. SH-PL17
  source 1..1077: mol_type = other DNA
atgggtgaccctacctttatgaacaatgtaccagaccctctgctgtttggcaaagatttgccgacgttcaagtttgagctggaaaagagcaagggcaaagtcattggggggagttcgggaaaagaagcaaccgttgtccagttacctatctccaaaggcattgctggtgtgagcatggtacttgaaccgggtgcgatgcgcgaattgcactggcatgccacagcagcagagtgggggttcgtattatggggccacgtccgtacgacggtgatcgatccacaaggtctggccgaaaccaacgactttggaccgggcgacgtgtggtattttcctcgcggtcatgggcacatgctggaatgcctgggcgataaaccggcgcatttcattctgatcttcgataacggctacttctcagagtttggcaccttctctattactgactggatcggtcacacaccgaaagcgcttctcgccaagaactttaagctgcccgaaagcgcttttgatgggtttcccaaaaaagaggtctattttgcacgtggcgcggttccaccagccacccctgcagcgcctttacagggactgaagctgccaccactcacgcataaatacgaactcctcgaacaagaacctcataaagtttttaaaggtggtcgtgaatggcgcgtggatagcactcgttttcccatttccaagactgtaaccggcgttgttcttgatttggaacccggcgcgttacgcgagcttcactggcatcctaatgctgacgagtggcaatatgtgatcgatggcaacattagtgtgacgatgttcggttctcatggccgtgtacgcaccgaacagatggagaagggtgatgtcgggtatattccacaggggtatggccacagcatcgaaaatgttggagatcgtccttgtcgcgtcttgattggctttaacacaggtaactaccaagcgatcgacttatcacagtggattgcaggtaatcccgcggatgttcttgccacgaacttctccaaacccaccagcctctttgaaaagttcccaaaacaggacgtgtttattgctcctggcaag

SEQ ID NO: 1506 - protein, 359 aa, synthetic construct
  REGION 1..359: note = Variant of oxalate decarboxylase from Gemmata sp. SH-PL17
MGDPTFMNNVPDPLLFGKDLPTFKFELEKSKGKVIGGSSGKEATVVQLPISKGIAGVSMVLEPGAMRELHWHATAAEWGFVLWGHVRTTVIDPQGLAETNDFGPGDVWYFPRGHGHMLECLGDKPAHFILIFDNGYFSEFGTFSITDWIGHTPKALLAKNFKLPESAFDGFPKKEVYFARGAVPPATPAAPLQGLKLPPLTHKYELLEQEPHKVFKGGREWRVDSTRFPISKTVTGVVLDLEPGALRELHWHPNADEWQYVIDGNISVTMFGSHGRVRTEQMEKGDVGYIPQGYGHSIENVGDRPCRVLIGFNTGNYQAIDLSQWIAGNPADVLATNFSKPTSLFEKFPKQDVFIAPGK

SEQ ID NO: 1507 - DNA, 1077 bp, synthetic construct
  misc_feature 1..1077: note = Variant of oxalate decarboxylase from Gemmata sp. SH-PL17
  source 1..1077: mol_type = other DNA
atgggtgaccctacctttatgaacaatgtaccagaccctctgctgtcgggcaaagatttgccgacgttcaagtttgagctggaaaagagcaagggcaaagtcattggggggagttcgggaaaagaagcaaccgttgtccagttacctatctccaaaggcattgctggtgtgagcatggtacttgaaccgggtgcgatgcgcgaattgcactggcatgccacagcagcagagtgggggttcgtattatggggccacgtccgtacgacggtgatcgatccacaaggtctggccgaaaccaacgactttggaccgggcgacgtgtggtattttcctcgcggtcatgggcacatgctggaatgcctgggcgataaaccggcgcatttcattctgatcttcgataacggctacttctcagagtttggcaccttctctattactgactggatcggtcacacaccgaaagcgcttctcgccaagaactttcagctgcccgaaagcgcttttgatgggtttcccaaaaaagaggtctattttgcacgtggcgcggttccaccagccacccctgcagcgcctttacagggactgaagctgccaccactcacgcataaatacgaactcctcgaacaagaacctcataaagtttttaaaggtggtcgtgaatggcgcgtggatagcactcgttttcccatttccaagactgtaaccggcgttgttcttgatttggaacccggcgcgttacgcgagcttcactggcatcctaatgctgacgagtggcaatatgtgatcgatggcaacattagtgtgacgatgttcggttctcatggccgtgtacgcaccgaacagatggagaagggtgatgtcgggtatattccacaggggtatggccacagcatcgaaaatgttggagatcgtccttgtcgcgtcttgattggctttaacacaggtaactaccaagcgatcgacttatcacagtggattgcaggtaatcccgcggatgttcttgccacgaacttctccaaacccaccagcctctttgaaaagttcccaaaacaggacgtgtttattgctcctggcaag

SEQ ID NO: 1508 - protein, 359 aa, synthetic construct
  REGION 1..359: note = Variant of oxalate decarboxylase from Gemmata sp. SH-PL17
MGDPTFMNNVPDPLLSGKDLPTFKFELEKSKGKVIGGSSGKEATVVQLPISKGIAGVSMVLEPGAMRELHWHATAAEWGFVLWGHVRTTVIDPQGLAETNDFGPGDVWYFPRGHGHMLECLGDKPAHFILIFDNGYFSEFGTFSITDWIGHTPKALLAKNFQLPESAFDGFPKKEVYFARGAVPPATPAAPLQGLKLPPLTHKYELLEQEPHKVFKGGREWRVDSTRFPISKTVTGVVLDLEPGALRELHWHPNADEWQYVIDGNISVTMFGSHGRVRTEQMEKGDVGYIPQGYGHSIENVGDRPCRVLIGFNTGNYQAIDLSQWIAGNPADVLATNFSKPTSLFEKFPKQDVFIAPGK

SEQ ID NO: 1509 - DNA, 1077 bp, synthetic construct
  misc_feature 1..1077: note = Variant of oxalate decarboxylase from Gemmata sp. SH-PL17
  source 1..1077: mol_type = other DNA
atgggtgaccctacctttatgaacaatgtaccagaccctctgctgtcgggcaaagatttgccgacgttcaagtttgagctggaaaagagcaagggcaaagtcattggggggagttcgggaaaagaagcaaccgttgtccagttacctatctccaaaggcattgctggtgtgagcatggtacttgaaccgggtgcgatgcgcgaattgcactggcatgccacagcagcagagtgggggttcgtattatggggccacgtccgtacgacggtgatcgatccacaaggtctggccgaaaccaacgactttggaccgggcgacgtgtggtattttcctcgcggtcatgggcacatgctggaatgcctgggcgataaaccggcgcatttcattctgatcttcgataacggctacttctcagagtttggcaccttctctattactgactggatcggtcacacaccgaaagcgcttctcgccaagaactttggcctgcccgaaagcgcttttgatgggtttcccaaaaaagaggtctattttgcacgtggcgcggttccaccagccacccctgcagcgcctttacagggactgaagctgccaccactcacgcataaatacgaactcctcgaacaagaacctcataaagtttttaaaggtggtcgtgaatggcgcgtggatagcactcgttttcccatttccaagactgtaaccggcgttgttcttgatttggaacccggcgcgttacgcgagcttcactggcatcctaatgctgacgagtggcaatatgtgatcgatggcaacattagtgtgacgatgttcggttctcatggccgtgtacgcaccgaacagatggagaagggtgatgtcgggtatattccacaggggtatggccacagcatcgaaaatgttggagatcgtccttgtcgcgtcttgattggctttaacacaggtaactaccaagcgatcgacttatcacagtggattgcaggtaatcccgcggatgttcttgccacgaacttctccaaacccaccagcctctttgaaaagttcccaaaacaggacgtgtttattgctcctggcaag

SEQ ID NO: 1510 - protein, 359 aa, synthetic construct
  REGION 1..359: note = Variant of oxalate decarboxylase from Gemmata sp. SH-PL17
MGDPTFMNNVPDPLLSGKDLPTFKFELEKSKGKVIGGSSGKEATVVQLPISKGIAGVSMVLEPGAMRELHWHATAAEWGFVLWGHVRTTVIDPQGLAETNDFGPGDVWYFPRGHGHMLECLGDKPAHFILIFDNGYFSEFGTFSITDWIGHTPKALLAKNFGLPESAFDGFPKKEVYFARGAVPPATPAAPLQGLKLPPLTHKYELLEQEPHKVFKGGREWRVDSTRFPISKTVTGVVLDLEPGALRELHWHPNADEWQYVIDGNISVTMFGSHGRVRTEQMEKGDVGYIPQGYGHSIENVGDRPCRVLIGFNTGNYQAIDLSQWIAGNPADVLATNFSKPTSLFEKFPKQDVFIAPGK

SEQ ID NO: 1511 - DNA, 1077 bp, synthetic construct
  misc_feature 1..1077: note = Variant of oxalate decarboxylase from Gemmata sp. SH-PL17
  source 1..1077: mol_type = other DNA
atgggtgaccctacctttatgaacaatgtaccagaccctctgctgtcgggcaaagatttgccgacgttcaagtttgagctggaaaagagcaagggcaaagtcattggggggagttcgggaaaagaagcaaccgttgtccagttacctatctccaaaggcattgctggtgtgagcatggtacttgaaccgggtgcgatgcgcgaattgcactggcatgccacagcagcagagtgggggttcgtattatggggccacgtccgtacgacggtgatcgatccacaaggtctggccgaaaccaacgactttggaccgggcgacgtgtggtattttcctcgcggtcatgggcacatgctggaatgcctgggcgataaaccggcgcatttcattctgatcttcgataacggctacttctcagagtttggcaccttctctattactgactggatcggtcacacaccgaaagcgcttctcgccaagaactttcgcctgcccgaaagcgcttttgatgggtttcccaaaaaagaggtctattttgcacgtggcgcggttccaccagccacccctgcagcgcctttacagggactgaagctgccaccactcacgcataaatacgaactcctcgaacaagaacctcataaagtttttaaaggtggtcgtgaatggcgcgtggatagcactcgttttcccatttccaagactgtaaccggcgttgttcttgatttggaacccggcgcgttacgcgagcttcactggcatcctaatgctgacgagtggcaatatgtgatcgatggcaacattagtgtgacgatgttcggttctcatggccgtgtacgcaccgaacagatggagaagggtgatgtcgggtatattccacaggggtatggccacagcatcgaaaatgttggagatcgtccttgtcgcgtcttgattggctttaacacaggtaactaccaagcgatcgacttatcacagtggattgcaggtaatcccgcggatgttcttgccacgaacttctccaaacccaccagcctctttgaaaagttcccaaaacaggacgtgtttattgctcctggcaag

SEQ ID NO: 1512 - protein, 359 aa, synthetic construct
  REGION 1..359: note = Variant of oxalate decarboxylase from Gemmata sp. SH-PL17
MGDPTFMNNVPDPLLSGKDLPTFKFELEKSKGKVIGGSSGKEATVVQLPISKGIAGVSMVLEPGAMRELHWHATAAEWGFVLWGHVRTTVIDPQGLAETNDFGPGDVWYFPRGHGHMLECLGDKPAHFILIFDNGYFSEFGTFSITDWIGHTPKALLAKNFRLPESAFDGFPKKEVYFARGAVPPATPAAPLQGLKLPPLTHKYELLEQEPHKVFKGGREWRVDSTRFPISKTVTGVVLDLEPGALRELHWHPNADEWQYVIDGNISVTMFGSHGRVRTEQMEKGDVGYIPQGYGHSIENVGDRPCRVLIGFNTGNYQAIDLSQWIAGNPADVLATNFSKPTSLFEKFPKQDVFIAPGK

SEQ ID NO: 1513 - DNA, 1077 bp, synthetic construct
  misc_feature 1..1077: note = Variant of oxalate decarboxylase from Gemmata sp. SH-PL17
  source 1..1077: mol_type = other DNA
atgggtgaccctacctttatgaacaatgtaccagaccctctgctgtcgggcaaagatttgccgacgttcaagtttgagctggaaaagagcaagggcaaagtcattggggggagttcgggaaaagaagcaaccgttgtccagttacctatctccaaaggcattgctggtgtgagcatggtacttgaaccgggtgcgatgcgcgaattgcactggcatgccacagcagcagagtgggggttcgtattatggggccacgtccgtacgacggtgatcgatccacaaggtctggccgaaaccaacgactttggaccgggcgacgtgtggtattttcctcgcggtcatgggcacatgctggaatgcctgggcgataaaccggcgcatttcattctgatcttcgataacggctacttctcagagtttggcaccttctctattactgactggatcggtcacacaccgaaagcgcttctcgccaagaactttaagctgcccgaaagcgcttttgatgggtttcccaaaaaagaggtctattttgcacgtggcgcggttccaccagccacccctgcagcgcctttacagggactgaagctgccaccactcacgcataaatacgaactcctcgaacaatttcctcataaagtttttaaaggtggtcgtgaatggcgcgtggatagcactcgttttcccatttccaagactgtaaccggcgttgttcttgatttggaacccggcgcgttacgcgagcttcactggcatcctaatgctgacgagtggcaatatgtgatcgatggcaacattagtgtgacgatgttcggttctcatggccgtgtacgcaccgaacagatggagaagggtgatgtcgggtatattccacaggggtatggccacagcatcgaaaatgttggagatcgtccttgtcgcgtcttgattggctttaacacaggtaactaccaagcgatcgacttatcacagtggattgcaggtaatcccgcggatgttcttgccacgaacttctccaaacccaccagcctctttgaaaagttcccaaaacaggacgtgtttattgctcctggcaag

SEQ ID NO: 1514 - protein, 359 aa, synthetic construct
  REGION 1..359: note = Variant of oxalate decarboxylase from Gemmata sp. SH-PL17
MGDPTFMNNVPDPLLSGKDLPTFKFELEKSKGKVIGGSSGKEATVVQLPISKGIAGVSMVLEPGAMRELHWHATAAEWGFVLWGHVRTTVIDPQGLAETNDFGPGDVWYFPRGHGHMLECLGDKPAHFILIFDNGYFSEFGTFSITDWIGHTPKALLAKNFKLPESAFDGFPKKEVYFARGAVPPATPAAPLQGLKLPPLTHKYELLEQFPHKVFKGGREWRVDSTRFPISKTVTGVVLDLEPGALRELHWHPNADEWQYVIDGNISVTMFGSHGRVRTEQMEKGDVGYIPQGYGHSIENVGDRPCRVLIGFNTGNYQAIDLSQWIAGNPADVLATNFSKPTSLFEKFPKQDVFIAPGK

SEQ ID NO: 1515 - DNA, 1077 bp, synthetic construct
  misc_feature 1..1077: note = Variant of oxalate decarboxylase from Gemmata sp. SH-PL17
  source 1..1077: mol_type = other DNA
atgggtgaccctacctttatgaacaatgtaccagaccctctgctgtcgggcaaagatttgccgacgttcaagtttgagctggaaaagagcaagggcaaagtcattggggggagttcgggaaaagaagcaaccgttgtccagttacctatctccaaaggcattgctggtgtgagcatggtacttgaaccgggtgcgatgcgcgaattgcactggcatgccacagcagcagagtgggggttcgtattatggggccacgtccgtacgacggtgatcgatccacaaggtctggccgaaaccaacgactttggaccgggcgacgtgtggtattttcctcgcggtcatgggcacatgctggaatgcctgggcgataaaccggcgcatttcattctgatcttcgataacggctacttctcagagtttggcaccttctctattactgactggatcggtcacacaccgaaagcgcttctcgccaagaacttttgtctgcccgaaagcgcttttgatgggtttcccaaaaaagaggtctattttgcacgtggcgcggttccaccagccacccctgcagcgcctttacagggactgaagctgccaccactcacgcataaatacgaactcctcgaacaagaacctcataaagtttttaaaggtggtcgtgaatggcgcgtggatagcactcgttttcccatttccaagactgtaaccggcgttgttcttgatttggaacccggcgcgttacgcgagcttcactggcatcctaatgctgacgagtggcaatatgtgatcgatggcaacattagtgtgacgatgttcggttctcatggccgtgtacgcaccgaacagatggagaagggtgatgtcgggtatattccacaggggtatggccacagcatcgaaaatgttggagatcgtccttgtcgcgtcttgattggctttaacacaggtaactaccaagcgatcgacttatcacagtggattgcaggtaatcccgcggatgttcttgccacgaacttctccaaacccaccagcctctttgaaaagttcccaaaacaggacgtgtttattgctcctggcaag

SEQ ID NO: 1516 - protein, 359 aa, synthetic construct
  REGION 1..359: note = Variant of oxalate decarboxylase from Gemmata sp. SH-PL17
MGDPTFMNNVPDPLLSGKDLPTFKFELEKSKGKVIGGSSGKEATVVQLPISKGIAGVSMVLEPGAMRELHWHATAAEWGFVLWGHVRTTVIDPQGLAETNDFGPGDVWYFPRGHGHMLECLGDKPAHFILIFDNGYFSEFGTFSITDWIGHTPKALLAKNFCLPESAFDGFPKKEVYFARGAVPPATPAAPLQGLKLPPLTHKYELLEQEPHKVFKGGREWRVDSTRFPISKTVTGVVLDLEPGALRELHWHPNADEWQYVIDGNISVTMFGSHGRVRTEQMEKGDVGYIPQGYGHSIENVGDRPCRVLIGFNTGNYQAIDLSQWIAGNPADVLATNFSKPTSLFEKFPKQDVFIAPGK

SEQ ID NO: 1517 - DNA, 1077 bp, synthetic construct
  misc_feature 1..1077: note = Variant of oxalate decarboxylase from Gemmata sp. SH-PL17
  source 1..1077: mol_type = other DNA
atgggtgaccctacctttatgaacaatgtaccagaccctctgctgtcgggcaaagatttgccgacgttcaagtttgagctggaaaagagcaagggcaaagtcattggggggagttcgggaaaagaagcaaccgttgtccagttacctatctccaaaggcattgctggtgtgagcatggtacttgaaccgggtgcgatgcgcgaattgcactggcatgccacagcagcagagtggggcttcgtattatggggccacgtccgtacgacggtgatcgatccacaaggtctggccgaaaccaacgactttggaccgggcgacgtgtggtattttcctcgcggtcatgggcacatgctggaatgcctgggcgataaaccggcgcatttcattctgatcttcgataacggctacttctcagagtttggcaccttctctattactgactggatcggtcacacaccgaaagcgcttctcgccaagaactttaagctgcccgaaagcgcttttgatgggtttcccaaagatgaggtctattttgcacgtggcgcggttccaccagccacccctgcagcgcctttacagggactgaagctgccaccactcacgcataaatacgaactcctcgaacaagagcctcataaagtttttaaaggtggtcgtgaatggcgcgtggatagcactcgttttcccatttccaagactgtaaccggcgttgttcttgatttggaacccggcgcgttacgcgagcttcactggcatcctaatgctgacgagtggcaatatgtgatcgatggcaacattagtgtgacgatgttcggttctcatggccgtgtccgcaccgaacagatggagaagggtgatgtcgggtatattccacaggggtatggccacagcatcgaaaatgttggagatcgtccttgtcgcgtcttgattggctttaacacaggtaactacgaggcgatcgacttatcacagtggattgcaggtaatcccgcggatgttcttgccacgaacttctccaaacccaccagcctctttgaaaagttcccaaaacaggacgtgtttattgctcctggcaag

SEQ ID NO: 1518 - protein, 359 aa, synthetic construct
  REGION 1..359: note = Variant of oxalate decarboxylase from Gemmata sp. SH-PL17
MGDPTFMNNVPDPLLSGKDLPTFKFELEKSKGKVIGGSSGKEATVVQLPISKGIAGVSMVLEPGAMRELHWHATAAEWGFVLWGHVRTTVIDPQGLAETNDFGPGDVWYFPRGHGHMLECLGDKPAHFILIFDNGYFSEFGTFSITDWIGHTPKALLAKNFKLPESAFDGFPKDEVYFARGAVPPATPAAPLQGLKLPPLTHKYELLEQEPHKVFKGGREWRVDSTRFPISKTVTGVVLDLEPGALRELHWHPNADEWQYVIDGNISVTMFGSHGRVRTEQMEKGDVGYIPQGYGHSIENVGDRPCRVLIGFNTGNYEAIDLSQWIAGNPADVLATNFSKPTSLFEKFPKQDVFIAPGK

SEQ ID NO: 1519 - DNA, 1077 bp, synthetic construct
  misc_feature 1..1077: note = Variant of oxalate decarboxylase from Gemmata sp. SH-PL17
  source 1..1077: mol_type = other DNA
atgggtgaccctacctttatgaacaatgtaccagaccctctgctgtcgggcaaagatttgccgacgttcaagtttgcactggaaaagagcaagggcaaagtcattgggggcagttcgggaaaagaagcaaccgttgtccagttacctatctccaaaggcattgctggtgtgagcatggtacttgaaccgggtgcgatgcgcgaattgcactggcatgccacagcagcagagtgggggttcgtattatggggccacgtccgtacgacggtgatcgatccacaaggtgcagccgaaaccaacgactttggaccgggcgacgtgtggtattttcctcgcggtcatgggcacatgctggaatgcctgggcgataaaccggcgcatttcattctgatcttcgataacggctacttctcagagtttggcaccttctctattactgactggatcggtcacacaccgaaagcgcttctcgccaagaactttaagctgcccgaaagcgcttttgatgggtttcccaaaaaggaggtctattttgcacgtggcgcggttccaccagccacccctgcagcgcctttacagggactgaagctgccaccactcacgcataaatacgaactcctcgaacaagaacctcataaagtttttaaaggtggtcgtgaatggcgcgtggatagcactcgttttcccatttccaagactgtaaccggcgttgttcttgatttggaacccggcgcgttacgcgagcttcactggcatcctaatgctgacgagtggcaatatgtgatcgatggcaacattagtgtgacgatgttcggttctcatggccgtgtccgcaccgaacagatggagaagggtgatgtcgggtatattccacaggggtatggccacagcatcgaaaatgttggagatcgtccttgtcgcgtcttgattggctttaacacaggtaactaccaggcgatcgacttatcacagtggattgcaggtaatcccgcggatgttcttgccacgaacttctccaaacccaccagcctctttgaaaagttcccaaaacaggacgtgtttattgctcctggcaag

SEQ ID NO: 1520 - protein, 359 aa, synthetic construct; identical to SEQ ID NO: 880
  REGION 1..359: note = Variant of oxalate decarboxylase from Gemmata sp. SH-PL17

SEQ ID NO: 1521 - DNA, 1077 bp, synthetic construct
  misc_feature 1..1077: note = Variant of oxalate decarboxylase from Gemmata sp. SH-PL17
  source 1..1077: mol_type = other DNA
atgggtgaccctacctttatgaacaatgtaccagaccctctgctgtcgggcaaagatttgccgacgttcaagtttgagctggaaaagagcaagggcaaagtcattggggggagttcgggaaaagaagcaaccgttgtccagttacctatctccaaaggcattgctggtgtgagcatgacgcttgaaccgggtgcgatgcgcgaattgcactggcatgccacagcagcagagtgggggttcgtattatggggccacgtccgtacgacggtgatcgatccacaaggtctggccgaaaccaacgactttggaccgggcgacgtgtggtattttcctcgcggtcatgggcacatgctggaatgcctgggcgataaaccggcgcatttcattctgatcttcgataacggctacttctcagagtttggcaccttctctattactgactggatcggtcacacaccgaaagcgcttctcgccaagaactttaagctgcccgaaagcgcttttgatgggtttcccaaaaaggaggtctattttgcacgtggcgcggttccaccagccacccctgcagcgcctttacagggactgaagctgccaccactcacgcataaatacgaactcctcgaacaagaacctcataaagtttttaaaggtggtcgtgaatggcgcgtggatagcactcgttttcccatttccaagactgtaaccggcgttgttcttgatttggaacccggcgcgttacgcgagcttcactggcatcctaatgctgacgagtggcaatatgtgatcgatggcaacattagtgtgacgatgttcggttctcatggccgtgtccgcaccgaacagatggagaagggtgatgtcgggtatattccacaggggtatggccacagcatcgaaaatgttggagatcgtccttgtcgcgtcttgattggctttaacacaggtaactacgaggcgatcgacttatcacagtggattgcaggtaatcccgcggatgttcttgccacgaacttctccaaacccaccagcctctttgaaaagttcccaaaacaggacgtgtttattgctcctggcaag

SEQ ID NO: 1522 - protein, 359 aa, synthetic construct
  REGION 1..359: note = Variant of oxalate decarboxylase from Gemmata sp. SH-PL17
MGDPTFMNNVPDPLLSGKDLPTFKFELEKSKGKVIGGSSGKEATVVQLPISKGIAGVSMTLEPGAMRELHWHATAAEWGFVLWGHVRTTVIDPQGLAETNDFGPGDVWYFPRGHGHMLECLGDKPAHFILIFDNGYFSEFGTFSITDWIGHTPKALLAKNFKLPESAFDGFPKKEVYFARGAVPPATPAAPLQGLKLPPLTHKYELLEQEPHKVFKGGREWRVDSTRFPISKTVTGVVLDLEPGALRELHWHPNADEWQYVIDGNISVTMFGSHGRVRTEQMEKGDVGYIPQGYGHSIENVGDRPCRVLIGFNTGNYEAIDLSQWIAGNPADVLATNFSKPTSLFEKFPKQDVFIAPGK

SEQ ID NO: 1523 - DNA, 1077 bp, synthetic construct
  misc_feature 1..1077: note = Variant of oxalate decarboxylase from Gemmata sp. SH-PL17
  source 1..1077: mol_type = other DNA
atgggtgaccctacctttatgaacaatgtaccagaccctctgctgtcgggcaaagatttgccgacgttcaagtttgaactggaaaagagcgagggcaaagtcattgggggcagttcgggaaaagaagcaaccgttgtccagttacctatctccaaaggcattgctggtgtgagcatggtacttgaaccgggtgcgatgcgcgaattgcactggcatgccacagcagcagagtggggcttcgtattatggggccacgtccgtacgacggtgatcgatccacaaggtctggccgaaaccaacgactttggaccgggcgacgtgtggtattttcctcgcggtcatgggcacatgctggaatgcctgggcgataaaccggcgcatttcattctgatcttcgataacggctacttctcagagtttggcaccttctctattactgactggatcggtcacacaccgaaagcgcttctcgccaagaactttaagctgcccgaaagcgcttttgatgggtttcccaaaaaagaggtctattttgcacgtggcgcggttccaccagccacccctgcagcgcctttacagggactgaagctgccaccactcacgcataaatacgaactcctcgaacaagagcctcataaagtttttaaaggtggtcgtgaatggcgcgtggatagcactcgttttcccatttccaagactgtaaccggcgttgttcttgatttggaacccggcgcgttacgcgagcttcactggcatcctaatgctgacgagtggcaatatgtgatcgatggcaacattagtgtgacgatgttcggttctcatggccgtgtccgcaccgaacagatggagaagggtgatgtcgggtatattccacaggggtatggccacagcatcgaaaatgttggagatcgtccttgtcgcgtcttgattggctttaacacaggtaactacgaggcgatcgacttatcacagtggattgcaggtaatcccgcggatgttcttgccacgaacttctccaaacccaccagcctctttgaaaagttcccaaaacaggacgtgtttattgctcctggcaag

SEQ ID NO: 1524 - protein, 359 aa, synthetic construct
  REGION 1..359: note = Variant of oxalate decarboxylase from Gemmata sp. SH-PL17
MGDPTFMNNVPDPLLSGKDLPTFKFELEKSEGKVIGGSSGKEATVVQLPISKGIAGVSMVLEPGAMRELHWHATAAEWGFVLWGHVRTTVIDPQGLAETNDFGPGDVWYFPRGHGHMLECLGDKPAHFILIFDNGYFSEFGTFSITDWIGHTPKALLAKNFKLPESAFDGFPKKEVYFARGAVPPATPAAPLQGLKLPPLTHKYELLEQEPHKVFKGGREWRVDSTRFPISKTVTGVVLDLEPGALRELHWHPNADEWQYVIDGNISVTMFGSHGRVRTEQMEKGDVGYIPQGYGHSIENVGDRPCRVLIGFNTGNYEAIDLSQWIAGNPADVLATNFSKPTSLFEKFPKQDVFIAPGK

SEQ ID NO: 1525 - DNA, 1077 bp, synthetic construct
  misc_feature 1..1077: note = Variant of oxalate decarboxylase from Gemmata sp. SH-PL17
  source 1..1077: mol_type = other DNA
atgggtgaccctacctttatgaacaatgtaccagaccctctgctgtcgggcaaagatttgccgacgttcaagtttgagctggaaaagagcaagggcaaagtcattggggggagttcgggaaaagaagcaaccgttgtccagttacctatctccaaaggcattgctggtgtgagcatggtacttgaaccgggtgcgatgcgcgaattgcactggcatgccacagcagcagagtgggggttcgtattatggggccacgtccgtacgacggtgatcgatccacaaggtctggccgaaaccaacgactttggaccgggcgacgtgtggtattttcctcgcggtcatgggcacatgctggaatgcctgggcgataaaccggcgcatttcattctgatcttcgataacggctacttctcagagtttggcaccttctctattactgactggatcggtcacacaccgaaagcgcttctcgccaagaactttggcctgcccgaaagcgcttttgatgggtttcccaaagatgaggtctattttgcacgtggcgcggttccaccagccacccctgcagcgcctttacagggactgaagctgccaccactcacgcataaatacgaactcctcgaacaagaacctcataaagtttttaaaggtggtcgtgaatggcgcgtggatagcactcgttttcccatttccaagactgtaaccggcgttgttcttgatttggaacccggcgcgttacgcgagcttcactggcatcctaatgctgacgagtggcaatatgtgatcgatggcaacattagtgtgacgatgttcggttctcatggccgtgtccgcaccgaacagatggagaagggtgatgtcgggtatattccacaggggtatggccacagcatcgaaaatgttggagatcgtccttgtcgcgtcttgattggctttaacacaggtaactacgaggcgatcgacttatcacagtggattgcaggtaatcccgcggatgttcttgccacgaacttctccaaacccaccagcctctttgaaaagttcccaaaacaggacgtgtttattgctcctggcaag

SEQ ID NO: 1526 - protein, 359 aa, synthetic construct
  REGION 1..359: note = Variant of oxalate decarboxylase from Gemmata sp. SH-PL17
MGDPTFMNNVPDPLLSGKDLPTFKFELEKSKGKVIGGSSGKEATVVQLPISKGIAGVSMVLEPGAMRELHWHATAAEWGFVLWGHVRTTVIDPQGLAETNDFGPGDVWYFPRGHGHMLECLGDKPAHFILIFDNGYFSEFGTFSITDWIGHTPKALLAKNFGLPESAFDGFPKDEVYFARGAVPPATPAAPLQGLKLPPLTHKYELLEQEPHKVFKGGREWRVDSTRFPISKTVTGVVLDLEPGALRELHWHPNADEWQYVIDGNISVTMFGSHGRVRTEQMEKGDVGYIPQGYGHSIENVGDRPCRVLIGFNTGNYEAIDLSQWIAGNPADVLATNFSKPTSLFEKFPKQDVFIAPGK

SEQ ID NO: 1527 - DNA, 1077 bp, synthetic construct
  misc_feature 1..1077: note = Variant of oxalate decarboxylase from Gemmata sp. SH-PL17
  source 1..1077: mol_type = other DNA
atgggtgaccctacctttatgaacaatgtaccagaccctctgctgtcgggcaaagatttgccgacgttcaagtttgagctggaaaagagcaagggcaaagtcattggggggagttcgggaaaagaagcaaccgttgtccagttacctatctccaaaggcattgctggtgtgagcatggtacttgaaccgggtgcgatgcgcgaattgcactggcatgccacagcagcagagtgggggttcgtattatggggccacgtccgtacgacggtgatcgatccacaaggtctggccgaaaccaacgactttggaccgggcgacgtgtggtattttcctcgcggtcatgggcacatgctggaatgcctgggcgataaaccggcgcatttcattctgatcttcgataacggctacttctcagagtttggcaccttctctattactgactggatcggtcacacaccgaaagcgcttctcgccaagaactttaagctgcccgaaagcgcttttgatgggtttcccaaagatgaggtctattttgcacgtggcgcggttccaccagccacccctgcagcgcctttacagggactgaagctgccaccactcacgcataaatacgaactcctcgaacaagaacctcataaagtttttaaaggtggtcgtgaatggcgcgtggatagcactcgttttcccatttccaagactgtaaccggcgttgttcttgatttggaacccggcgcgttacgcgagcttcactggcatcctaatgctgacgagtggcaatatgtgatcgatggcaacattagtgtgacgatgttcggttctcatggccgttaccgcaccgaacagatggagaaaggtgatgtcgggtatattccacaggggtatggccacagcatcgaaaatgttggagatcgtccttgtcgcgtcttgattggctttaacacaggtaactacgaggcgatcgacttatcacagtggattgcaggtaatcccgcggatgttcttgccacgaacttctccaaacccaccagcctctttgaaaagttcccaaaacaggacgtgtttattgctcctggcaag

SEQ ID NO: 1528 - protein, 359 aa, synthetic construct
  REGION 1..359: note = Variant of oxalate decarboxylase from Gemmata sp. SH-PL17
MGDPTFMNNVPDPLLSGKDLPTFKFELEKSKGKVIGGSSGKEATVVQLPISKGIAGVSMVLEPGAMRELHWHATAAEWGFVLWGHVRTTVIDPQGLAETNDFGPGDVWYFPRGHGHMLECLGDKPAHFILIFDNGYFSEFGTFSITDWIGHTPKALLAKNFKLPESAFDGFPKDEVYFARGAVPPATPAAPLQGLKLPPLTHKYELLEQEPHKVFKGGREWRVDSTRFPISKTVTGVVLDLEPGALRELHWHPNADEWQYVIDGNISVTMFGSHGRYRTEQMEKGDVGYIPQGYGHSIENVGDRPCRVLIGFNTGNYEAIDLSQWIAGNPADVLATNFSKPTSLFEKFPKQDVFIAPGK

SEQ ID NO: 1529 - DNA, 1077 bp, synthetic construct
  misc_feature 1..1077: note = Variant of oxalate decarboxylase from Gemmata sp. SH-PL17
  source 1..1077: mol_type = other DNA
atgggtgaccctacctttatgaacaatgtaccagaccctctgctgtcgggcaaagatttgccgacgttcaagtttgcactggaaaagagcaagggcaaagtcattgggggcagttcgggaaaagaagcaaccgttgtccagttacctatctccaaaggcattgctggtgtgagcatggtacttgaaccgggtgcgatgcgcgaattgcactggcatgccacagcagcagagtggggcttcgtattatggggccacgtccgtacgacggtgatcgatccacaaggtctggccgaaaccaacgactttggaccgggcgacgtgtggtattttcctcgcggtcatgggcacatgctggaatgcctgggcgataaaccggcgcatttcattctgatcttcgataacggctacttctcagagtttggcaccttctctattactgactggatcggtcacacaccgaaagcgcttctcgccaagaactttaagctgcccgaaagcgcttttgatgggtttcccaaaaaagaggtctattttgcacgtggcgcggttccaccagccacccctgcagcgcctttacagggacgcaagctgccaccactcacgcataaatacgaactcctcgaacaagaacctcataaagtttttaaaggtggtcgtgaatggcgcgtggatagcactcgttttcccatttccaagactgtaaccggcgttgttcttgatttggaacccggcgcgttacgcgagcttcactggcatcctaatgctgacgagtggcaatatgtgatcgatggcaacattagtgtgacgatgttcggttctcatggccgtgtccgcaccgaacagatggagaagggtgatgtcgggtatattccacaggggtatggccacagcatcgaaaatgttggagatcgtccttgtcgcgtcttgattggctttaacacaggtaactacgaggcgatcgacttatcacagtggattgcaggtaatcccgcggatgttcttgccacgaacttctccaaacccaccagcctctttgaaaagttcccaaaacaggacgtgtttattgctcctggcaag

SEQ ID NO: 1530 - protein, 359 aa, synthetic construct
  REGION 1..359: note = Variant of oxalate decarboxylase from Gemmata sp. SH-PL17
MGDPTFMNNVPDPLLSGKDLPTFKFALEKSKGKVIGGSSGKEATVVQLPISKGIAGVSMVLEPGAMRELHWHATAAEWGFVLWGHVRTTVIDPQGLAETNDFGPGDVWYFPRGHGHMLECLGDKPAHFILIFDNGYFSEFGTFSITDWIGHTPKALLAKNFKLPESAFDGFPKKEVYFARGAVPPATPAAPLQGRKLPPLTHKYELLEQEPHKVFKGGREWRVDSTRFPISKTVTGVVLDLEPGALRELHWHPNADEWQYVIDGNISVTMFGSHGRVRTEQMEKGDVGYIPQGYGHSIENVGDRPCRVLIGFNTGNYEAIDLSQWIAGNPADVLATNFSKPTSLFEKFPKQDVFIAPGK

SEQ ID NO: 1531 - DNA, 1077 bp, synthetic construct
  misc_feature 1..1077: note = Variant of oxalate decarboxylase from Gemmata sp. SH-PL17
  source 1..1077: mol_type = other DNA
atgggtgaccctacctttatgaacaatgtaccagaccctctgctgtcgggcaaagatttgccgacgttcaagtttgagctggaaaagagcaagggcaaagtcattggggggagttcgggaaaagaagcaaccgttgtccagttacctatctccaaaggcattgctggtgtgagcatgacgcttgaaccgggtgcgatgcgcgaattgcactggcatgccacagcagcagagtgggggttcgtattatggggccacgtccgtacgacggtgatcgatccacaaggtctggccgaaaccaacgactttggaccgggcgacgtgtggtattttcctcgcggtcatgggcacatgctggaatgcctgggcgataaaccggcgcatttcattctgatcttcgataacggctacttctcagagtttggcaccttctctattactgactggatcggtcacacaccgaaagcgcttctcgccaagaactttggcctgcccgaaagcgcttttgatgggtttcccaaaaaggaggtctattttgcacgtggcgcggttccaccagccacccctgcagcgcctttacagggacgcaagctgccaccactcacgcataaatacgaactcctcgaacaagaacctcataaagtttttaaaggtggtcgtgaatggcgcgtggatagcactcgttttcccatttccaagactgtaaccggcgttgttcttgatttggaacccggcgcgttacgcgagcttcactggcatcctaatgctgacgagtggcaatatgtgatcgatggcaacattagtgtgacgatgttcggttctcatggccgtgtccgcaccgaacagatggagaagggtgatgtcgggtatattccacaggggtatggccacagcatcgaaaatgttggagatcgtccttgtcgcgtcttgattggctttaacacaggtaactaccaagcgatcgacttatcacagtggattgcaggtaatcccgcggatgttcttgccacgaacttctccaaacccaccagcctctttgaaaagttcccaaaacaggacgtgtttattgctcctggcaag

SEQ ID NO: 1532 - protein, 359 aa, synthetic construct
  REGION 1..359: note = Variant of oxalate decarboxylase from Gemmata sp. SH-PL17
MGDPTFMNNVPDPLLSGKDLPTFKFELEKSKGKVIGGSSGKEATVVQLPISKGIAGVSMTLEPGAMRELHWHATAAEWGFVLWGHVRTTVIDPQGLAETNDFGPGDVWYFPRGHGHMLECLGDKPAHFILIFDNGYFSEFGTFSITDWIGHTPKALLAKNFGLPESAFDGFPKKEVYFARGAVPPATPAAPLQGRKLPPLTHKYELLEQEPHKVFKGGREWRVDSTRFPISKTVTGVVLDLEPGALRELHWHPNADEWQYVIDGNISVTMFGSHGRVRTEQMEKGDVGYIPQGYGHSIENVGDRPCRVLIGFNTGNYQAIDLSQWIAGNPADVLATNFSKPTSLFEKFPKQDVFIAPGK

SEQ ID NO: 1533 - DNA, 1077 bp, synthetic construct
  misc_feature 1..1077: note = Variant of oxalate decarboxylase from Gemmata sp. SH-PL17
  source 1..1077: mol_type = other DNA
atgggtgaccctacctttatgaacaatgtaccagaccctctgctgtcgggcaaagatttgccgacgttcaagtttgagctggaaaagagcaagggcaaagtcattggggggagttcgggaaaagaagcaaccgttgtccagttacctatctccaaaggcattgctggtgtgagcatgacgcttgaaccgggtgcgatgcgcgaattgcactggcatgccacagcagcagagtggggcttcgtattatggggccacgtccgtacgacggtgatcgatccacaaggtctggccgaaaccaacgactttggaccgggcgacgtgtggtattttcctcgcggtcatgggcacatgctggaatgcctgggcgataaaccggcgcatttcattctgatcttcgataacggctacttctcagagtttggcaccttctctattactgactggatcggtcacacaccgaaagcgcttctcgccaagaactttggcctgcccgaaagcgcttttgatgggtttcccaaaaaggaggtctattttgcacgtggcgcggttccaccagccacccctgcagcgcctttacagggactgaagctgccaccactcacgcataaatacgaactcctcgaacaagagcctcataaagtttttaaaggtggtcgtgaatggcgcgtggatagcactcgttttcccatttccaagactgtaaccggcgttgttcttgatttggaacccggcgcgttacgcgagcttcactggcatcctaatgctgacgagtggcaatatgtgatcgatggcaacattagtgtgacgatgttcggttctcatggccgtgtccgcaccgaacagatggagaagggtgatgtcgggtatattccacaggggtatggccacagcatcgaaaatgttggagatcgtccttgtcgcgtcttgattggctttaacacaggtaactacgaggcgatcgacttatcacagtggattgcaggtaatcccgcggatgttcttgccacgaacttctccaaacccaccagcctctttgaaaagttcccaaaacaggacgtgtttattgctcctggcaag

SEQ ID NO: 1534 - protein, 359 aa, synthetic construct
  REGION 1..359: note = Variant of oxalate decarboxylase from Gemmata sp. SH-PL17
MGDPTFMNNVPDPLLSGKDLPTFKFELEKSKGKVIGGSSGKEATVVQLPISKGIAGVSMTLEPGAMRELHWHATAAEWGFVLWGHVRTTVIDPQGLAETNDFGPGDVWYFPRGHGHMLECLGDKPAHFILIFDNGYFSEFGTFSITDWIGHTPKALLAKNFGLPESAFDGFPKKEVYFARGAVPPATPAAPLQGLKLPPLTHKYELLEQEPHKVFKGGREWRVDSTRFPISKTVTGVVLDLEPGALRELHWHPNADEWQYVIDGNISVTMFGSHGRVRTEQMEKGDVGYIPQGYGHSIENVGDRPCRVLIGFNTGNYEAIDLSQWIAGNPADVLATNFSKPTSLFEKFPKQDVFIAPGK

SEQ ID NO: 1535 - DNA, 1077 bp, synthetic construct
  misc_feature 1..1077: note = Variant of oxalate decarboxylase from Gemmata sp. SH-PL17
  source 1..1077: mol_type = other DNA
atgggtgaccctacctttatgaacaatgtaccagaccctctgctgtcgggcaaagatttgccgacgttcaagtttgagctggaaaagagcaagggcaaagtcattgggggcagttcgggaaaagaagcaaccgttgtccagttacctatctccaaaggcattgctggtgtgagcatggtacttgaaccgggtgcgatgcgcgaattgcactggcatgccacagcagcagagtgggggttcgtattatggggccacgtccgtacgacggtgatcgatccacaaggtctggccgaaaccaacgactttggaccgggcgacgtgtggtattttcctcgcggtcatgggcacatgctggaatgcctgggcgataaaccggcgcatttcattctgatcttcgataacggctacttctcagagtttggcaccttctctattactgactggatcggtcacacaccgaaagcgcttctcgccaagaactttaagctgcccgaaagcgcttttgatgggtttcccaaagatgaggtctattttgcacgtggcgcggttccaccagccacccctgcagcgcctttacagggacgcaagctgccaccactcacgcataaatacgaactcctcgaacaagaacctcataaagtttttaaaggtggtcgtgaatggcgcgtggatagcactcgttttcccatttccaagactgtaaccggcgttgttcttgatttggaacccggcgcgttacgcgagcttcactggcatcctaatgctgacgagtggcaatatgtgatcgatggcaacattagtgtgacgatgttcggttctcatggccgttatcgcaccgaacagatggagaagggtgatgtcgggtatattccacaggggtatggccacagcatcgaaaatgttggagatcgtccttgtcgcgtcttgattggctttaacacaggtaactaccaggcgatcgacttatcacagtggattgcaggtaatcccgcggatgttcttgccacgaacttctccaaacccaccagcctctttgaaaagttcccaaaacaggacgtgtttattgctcctggcaag

SEQ ID NO: 1536 - protein, 359 aa, synthetic construct
  REGION 1..359: note = Variant of oxalate decarboxylase from Gemmata sp. SH-PL17
MGDPTFMNNVPDPLLSGKDLPTFKFELEKSKGKVIGGSSGKEATVVQLPISKGIAGVSMVLEPGAMRELHWHATAAEWGFVLWGHVRTTVIDPQGLAETNDFGPGDVWYFPRGHGHMLECLGDKPAHFILIFDNGYFSEFGTFSITDWIGHTPKALLAKNFKLPESAFDGFPKDEVYFARGAVPPATPAAPLQGRKLPPLTHKYELLEQEPHKVFKGGREWRVDSTRFPISKTVTGVVLDLEPGALRELHWHPNADEWQYVIDGNISVTMFGSHGRYRTEQMEKGDVGYIPQGYGHSIENVGDRPCRVLIGFNTGNYQAIDLSQWIAGNPADVLATNFSKPTSLFEKFPKQDVFIAPGK

SEQ ID NO: 1537 - DNA, 1077 bp, synthetic construct
  misc_feature 1..1077: note = Variant of oxalate decarboxylase from Gemmata sp. SH-PL17
  source 1..1077: mol_type = other DNA
atgggtgaccctacctttatgaacaatgtaccagaccctctgctggcggacaaagatttgccgacgttcaagtttgaactggaaaagagcaagggcaaagtcattgggggcagttcgggaaaagaagcaaccgttgtccagttacctatctccaaaggcattgctggtgtgagcatggtacttgaaccgggtgcgatgcgcgaattgcactggcatgccacagcagcagagtgggggttcgtattatggggccacgtccgtacgacggtgatcgatccacaaggtctggccgaaaccaacgactttggaccgggcgacgtgtggtattttcctcgcggtcatgggcacatgctggaatgcctgggcgataaaccggcgcatttcattctgatcttcgataacggctacttctcagagtttggcaccttctctattactgactggatcggtcacacaccgaaagcgcttctcgccaagaactttaagctgcccgaaagcgcttttgatgggtttcccaaagatgaggtctattttgcacgtggcgcggttccaccagccacccctgcagcgcctttacagggactgaagctgccaccactcacgcataaatacgaactcctcgaacaagaacctcataaagtttttaaaggtggtcgtgaatggcgcgtggatagcactcgttttcccatttccaagactgtaaccggcgttgttcttgatttggaacccggcgcgttacgcgagcttcactggcatcctaatgctgacgagtggcaatatgtgatcgatggcaacattagtgtgacgatgttcggttctcatggccgtgtacgcaccgaacagatggagaagggtgatgtcgggtatattccacaggggtatggccacagcatcgaaaatgttggagatcgtccttgtcgcgtcttgattggctttaacacaggtaactaccaggcgatcgacttatcacagtggattgcaggtaatcccgcggatgttcttgccacgaacttctccaaacccaccagcctctttgaaaagttcccaaaacaggacgtgtttattgctcctggcaag

SEQ ID NO: 1538 - protein, 359 aa, synthetic construct
  REGION 1..359: note = Variant of oxalate decarboxylase from Gemmata sp. SH-PL17
MGDPTFMNNVPDPLLADKDLPTFKFELEKSKGKVIGGSSGKEATVVQLPISKGIAGVSMVLEPGAMRELHWHATAAEWGFVLWGHVRTTVIDPQGLAETNDFGPGDVWYFPRGHGHMLECLGDKPAHFILIFDNGYFSEFGTFSITDWIGHTPKALLAKNFKLPESAFDGFPKDEVYFARGAVPPATPAAPLQGLKLPPLTHKYELLEQEPHKVFKGGREWRVDSTRFPISKTVTGVVLDLEPGALRELHWHPNADEWQYVIDGNISVTMFGSHGRVRTEQMEKGDVGYIPQGYGHSIENVGDRPCRVLIGFNTGNYQAIDLSQWIAGNPADVLATNFSKPTSLFEKFPKQDVFIAPGK

SEQ ID NO: 1539 - DNA, 1077 bp, synthetic construct
  misc_feature 1..1077: note = Variant of oxalate decarboxylase from Gemmata sp. SH-PL17
  source 1..1077: mol_type = other DNA
atgggtgaccctacctttatgaacaatgtaccagaccctctgctgtcgggcaaagatttgccgacgttcaagtttgagctggaaaagagcaagggcaaagtcattggggggagttcgggaaaagaagcaaccgttgtccagttacctatctccaaaggcattgctggtgtgagcatgacgcttgaaccgggtgcgatgcgcgaattgcactggcatgccacagcagcagagtgggggttcgtattatggggccacgtccgtacgacggtgatcgatccacaaggtctggccgaaaccaacgactttggaccgggcgacgtgtggtattttcctcgcggtcatgggcacatgctggaatgcctgggcgataaaccggcgcatttcattctgatcttcgataacggctacttctcagagtttggcaccttctctattactgactggatcggtcacacaccgaaagcgcttctcgccaagaactttaagctgcccgaaagcgcttttgatgggtttcccaaaaaagaggtctattttgcacgtggcgcggttccaccagccacccctgcagcgcctttacagggacgcaagctgccaccactcacgcataaatacgaactcctcgaacaagaacctcataaagtttttaaaggtggtcgtgaatggcgcgtggatagcactcgttttcccatttccaagactgtaaccggcgttgttcttgatttggaacccggcgcgttacgcgagcttcactggcatcctaatgctgacgagtggcaatatgtgatcgatggcaacattagtgtgacgatgttcggttctcatggccgttatcgcaccgaacagatggagaagggtgatgtcgggtatattccacaggggtatggccacagcatcgaaaatgttggagatcgtccttgtcgcgtcttgattggctttaacacaggtaactaccaagcgatcgacttatcacagtggattgcaggtaatcccgcggatgttcttgccacgaacttctccaaacccaccagcctctttgaaaagttcccaaaacaggacgtgtttattgctcctggcaag

SEQ ID NO: 1540 - protein, 359 aa, synthetic construct
  REGION 1..359: note = Variant of oxalate decarboxylase from Gemmata sp. SH-PL17
MGDPTFMNNVPDPLLSGKDLPTFKFELEKSKGKVIGGSSGKEATVVQLPISKGIAGVSMTLEPGAMRELHWHATAAEWGFVLWGHVRTTVIDPQGLAETNDFGPGDVWYFPRGHGHMLECLGDKPAHFILIFDNGYFSEFGTFSITDWIGHTPKALLAKNFKLPESAFDGFPKKEVYFARGAVPPATPAAPLQGRKLPPLTHKYELLEQEPHKVFKGGREWRVDSTRFPISKTVTGVVLDLEPGALRELHWHPNADEWQYVIDGNISVTMFGSHGRYRTEQMEKGDVGYIPQGYGHSIENVGDRPCRVLIGFNTGNYQAIDLSQWIAGNPADVLATNFSKPTSLFEKFPKQDVFIAPGK

SEQ ID NO: 1541 - DNA, 1077 bp, synthetic construct
  misc_feature 1..1077: note = Variant of oxalate decarboxylase from Gemmata sp. SH-PL17
  source 1..1077: mol_type = other DNA
atgggtgaccctacctttatgaacaatgtaccagaccctctgctgtcgggcaaagatttgccgacgttcaagtttgagctggaaaagagcaagggcaaagtcattgggaaaagttcgggaaaagaagcaaccgttgtccagttacctatctccaaaggcattgctggtgtgagcatggtacttgaaccgggtgcgatgcgcgaattgcactggcatgccacagcagcagagtggggcttcgtattatggggccacgtccgtacgacggtgatcgatccacaaggtctggccgaaaccaacgactttggaccgggcgacgtgtggtattttcctcgcggtcatgggcacatgctggaatgcctgggcgataaaccggcgcatttcattctgatcttcgataacggctacttctcagagtttggcaccttctctattactgactggatcggtcacacaccgaaagcgcttctcgccaagaactttaagctgcccgaaagcgcttttgatgggtttcccaaaaaggaggtctattttgcacgtggcgcggttccaccagccacccctgcagcgcctttacagggactgaagctgccaccactcacgcataaatacgaactcctcgaacaagaacctcataaagtttttaaaggtggtcgtgaatggcgcgtggatagcactcgttttcccatttccaagactgtaaccggcgttgttcttgatttggaacccggcgcgttacgcgagcttcactggcatcctaatgctgacgagtggcaatatgtgatcgatggcaacattagtgtgacgatgttcggttctcatggccgttatcgcaccgaacagatggagaagggtgatgtcgggtatattccacaggggtatggccacagcatcgaaaatgttggagatcgtccttgtcgcgtcttgattggctttaacacaggtaactacgaggcgatcgacttatcacagtggattgcaggtaatcccgcggatgttcttgccacgaacttctccaaacccaccagcctctttgaaaagttcccaaaacaggacgtgtttattgctcctggcaag

SEQ ID NO: 1542 - protein, 359 aa, synthetic construct
  REGION 1..359: note = Variant of oxalate decarboxylase from Gemmata sp. SH-PL17
MGDPTFMNNVPDPLLSGKDLPTFKFELEKSKGKVIGKSSGKEATVVQLPISKGIAGVSMVLEPGAMRELHWHATAAEWGFVLWGHVRTTVIDPQGLAETNDFGPGDVWYFPRGHGHMLECLGDKPAHFILIFDNGYFSEFGTFSITDWIGHTPKALLAKNFKLPESAFDGFPKKEVYFARGAVPPATPAAPLQGLKLPPLTHKYELLEQEPHKVFKGGREWRVDSTRFPISKTVTGVVLDLEPGALRELHWHPNADEWQYVIDGNISVTMFGSHGRYRTEQMEKGDVGYIPQGYGHSIENVGDRPCRVLIGFNTGNYEAIDLSQWIAGNPADVLATNFSKPTSLFEKFPKQDVFIAPGK

SEQ ID NO: 1543 - DNA, 1077 bp, synthetic construct
  misc_feature 1..1077: note = Variant of oxalate decarboxylase from Gemmata sp. SH-PL17
  source 1..1077: mol_type = other DNA
atgggtgaccctacctttatgaacaatgtaccagaccctctgctggcgggcaaagatttgccgacgttcaagtttgagctggaaaagagcaagggcaaagtcattggggggagttcgggaaaagaagcaaccgttgtccagttacctatctccaaaggcattgctggtgtgagcatggtacttgaaccgggtgcgatgcgcgaattgcactggcatgccacagcagcagagtgggggttcgtattatggggccacgtccgtacgacggtgatcgatccacaaggtctggccgaaaccaacgactttggaccgggcgacgtgtggtattttcctcgcggtcatgggcacatgctggaatgcctgggcgataaaccggcgcatttcattctgatcttcgataacggctacttctcagagtttggcaccttctctattactgactggatcggtcacacaccgaaagcgcttctcgccaagaactttggcctgcccgaaagcgcttttgatgggtttcccaaaaaagaggtctattttgcacgtggcgcggttccaccagccacccctgcagcgcctttacagggacgcaagctgccaccactcacgcataaatacgaactcctcgaacaagaacctcataaagtttttaaaggtggtcgtgaatggcgcgtggatagcactcgttttcccatttccaagactgtaaccggcgttgttcttgatttggaacccggcgcgttacgcgagcttcactggcatcctaatgctgacgagtggcaatatgtgatcgatggcaacattagtgtgacgatgttcggttctcatggccgttatcgcaccgaacagatggagaagggtgatgtcgggtatattccacaggggtatggccacagcatcgaaaatgttggagatcgtccttgtcgcgtcttgattggctttaacacaggtaactaccaagcgatcgacttatcacagtggattgcaggtaatcccgcggatgttcttgccacgaacttctccaaacccaccagcctctttgaaaagttcccaaaacaggacgtgtttattgctcctggcaag

SEQ ID NO: 1544 - protein, 359 aa, synthetic construct
  REGION 1..359: note = Variant of oxalate decarboxylase from Gemmata sp. SH-PL17
MGDPTFMNNVPDPLLAGKDLPTFKFELEKSKGKVIGGSSGKEATVVQLPISKGIAGVSMVLEPGAMRELHWHATAAEWGFVLWGHVRTTVIDPQGLAETNDFGPGDVWYFPRGHGHMLECLGDKPAHFILIFDNGYFSEFGTFSITDWIGHTPKALLAKNFGLPESAFDGFPKKEVYFARGAVPPATPAAPLQGRKLPPLTHKYELLEQEPHKVFKGGREWRVDSTRFPISKTVTGVVLDLEPGALRELHWHPNADEWQYVIDGNISVTMFGSHGRYRTEQMEKGDVGYIPQGYGHSIENVGDRPCRVLIGFNTGNYQAIDLSQWIAGNPADVLATNFSKPTSLFEKFPKQDVFIAPGK

SEQ ID NO: 1545 - DNA, 1077 bp, synthetic construct
  misc_feature 1..1077: note = Variant of oxalate decarboxylase from Gemmata sp. SH-PL17
  source 1..1077: mol_type = other DNA
atgggtgaccctacctttatgaacaatgtaccagaccctctgctgtcgggcaaagatttgccgacgttcaagtttgcactggaaaagagcaagggcaaagtcattgggggcagttcgggaaaagaagcaaccgttgtccagttacctatctccaaaggcattgctggtgtgagcatggtacttgaaccgggtgcgatgcgcgaattgcactggcatgccacagcagcagagtgggccttcgtattaactggccacgtccgtacgacggtgatcgatccacaaggtctggccgaaaccaacgactttggaccgggcgacgtgtggtattttcctcgcggtcatgggcacatgctggaatgcctgggcgataaaccggcgcatttcattctgatcttcgataacggctacttctcagagtttggcaccttctctattactgactggatcggtcacacaccgaaagcgcttctcgccaagaactttggcctgcccgaaagcgcttttgatgggtttcccaaaaaggaggtctattttgcacgtggcgcggttccaccagccacccctgcagcgcctttacagggactgaagctgccaccactcacgcataaatacgaactcctcgaacaagaacctcataaagtttttaaaggtggtcgtgaatggcgcgtggatagcactcgttttcccatttccaagactgtaaccggcgttgttcttgatttggaacccggcgcgttacgcgagcttcactggcatcctaatgctgacgagtggcaatatgtgatcgatggcaacattagtgtgacgatgttcggttctcatggccgtgtccgcaccgaacagatggagaagggtgatgtcgggtatattccacaggggtatggccacagcatcgaaaatgttggagatcgtccttgtcgcgtcttgattggctttaacacaggtaactaccaggcgatcgacttatcacagtggattgcaggtaatcccgcggatgttcttgccacgaacttctccaaacccaccagcctctttgaaaagttcccaaaacaggacgtgtttattgctcctggcaag

SEQ ID NO: 1546 - protein, 359 aa, synthetic construct
  REGION 1..359: note = Variant of oxalate decarboxylase from Gemmata sp. SH-PL17
MGDPTFMNNVPDPLLSGKDLPTFKFALEKSKGKVIGGSSGKEATVVQLPISKGIAGVSMVLEPGAMRELHWHATAAEWAFVLTGHVRTTVIDPQGLAETNDFGPGDVWYFPRGHGHMLECLGDKPAHFILIFDNGYFSEFGTFSITDWIGHTPKALLAKNFGLPESAFDGFPKKEVYFARGAVPPATPAAPLQGLKLPPLTHKYELLEQEPHKVFKGGREWRVDSTRFPISKTVTGVVLDLEPGALRELHWHPNADEWQYVIDGNISVTMFGSHGRVRTEQMEKGDVGYIPQGYGHSIENVGDRPCRVLIGFNTGNYQAIDLSQWIAGNPADVLATNFSKPTSLFEKFPKQDVFIAPGK

SEQ ID NO: 1547 - DNA, 1077 bp, synthetic construct
  misc_feature 1..1077: note = Variant of oxalate decarboxylase from Gemmata sp. SH-PL17
  source 1..1077: mol_type = other DNA
atgggtgaccctacctttatgaacaatgtaccagaccctctgctgtcgggcaaagatttgccgacgttcaagtttgcactggaaaagagcgagggcaaagtcattgggggcagttcgggaaaagaagcaaccgttgtccagttacctatctccaaaggcattgctggtgtgagcatgacgcttgaaccgggtgcgatgcgcgaattgcactggcatgccacagcagcagagtgggggttcgtattatggggccacgtccgtacgacggtgatcgatccacaaggtctggccgaaaccaacgactttggaccgggcgacgtgtggtattttcctcgcggtcatgggcacatgctggaatgcctgggcgataaaccggcgcatttcattctgatcttcgataacggctacttctcagagtttggcaccttctctattactgactggatcggtcacacaccgaaagcgcttctcgccaagaactttaagctgcccgaaagcgcttttgatgggtttcccaaaaaggaggtctattttgcacgtggcgcggttccaccagccacccctgcagcgcctttacagggactgaagctgccaccactcacgcataaatacgaactcctcgaacaagagcctcataaagtttttaaaggtggtcgtgaatggcgcgtggatagcactcgttttcccatttccaagactgtaaccggcgttgttcttgatttggaacccggcgcgttacgcgagcttcactggcatcctaatgctgacgagtggcaatatgtgatcgatggcaacattagtgtgacgatgttcggttctcatggccgtgtccgcaccgaacagatggagaagggtgatgtcgggtatattccacaggggtatggccacagcatcgaaaatgttggagatcgtccttgtcgcgtcttgattggctttaacacaggtaactacgaggcgatcgacttatcacagtggattgcaggtaatcccgcggatgttcttgccacgaacttctccaaacccaccagcctctttgaaaagttcccaaaacaggacgtgtttattgctcctggcaag

SEQ ID NO: 1548 - protein, 359 aa, synthetic construct
  REGION 1..359: note = Variant of oxalate decarboxylase from Gemmata sp. SH-PL17
MGDPTFMNNVPDPLLSGKDLPTFKFALEKSEGKVIGGSSGKEATVVQLPISKGIAGVSMTLEPGAMRELHWHATAAEWGFVLWGHVRTTVIDPQGLAETNDFGPGDVWYFPRGHGHMLECLGDKPAHFILIFDNGYFSEFGTFSITDWIGHTPKALLAKNFKLPESAFDGFPKKEVYFARGAVPPATPAAPLQGLKLPPLTHKYELLEQEPHKVFKGGREWRVDSTRFPISKTVTGVVLDLEPGALRELHWHPNADEWQYVIDGNISVTMFGSHGRVRTEQMEKGDVGYIPQGYGHSIENVGDRPCRVLIGFNTGNYEAIDLSQWIAGNPADVLATNFSKPTSLFEKFPKQDVFIAPGK

SEQ ID NO: 1549 - DNA, 1077 bp, synthetic construct
  misc_feature 1..1077: note = Variant of oxalate decarboxylase from Gemmata sp. SH-PL17
  source 1..1077: mol_type = other DNA
atgggtgaccctacctttatgaacaatgtaccagaccctctgctggcgggcaaagatttgccgacgttcaagtttgaactggaaaagagcaagggcaaagtcattgggggcagttcgggaaaagaagcaaccgttgtccagttacctatctccaaaggcattgctggtgtgagcatggtacttgaaccgggtgcgatgcgcgaattgcactggcatgccacagcagcagagtggggcttcgtattatggggccacgtccgtacgacggtgatcgatccacaaggtctggccgaaaccaacgactttggaccgggcgacgtgtggtattttcctcgcggtcatgggcacatgctggaatgcctgggcgataaaccggcgcatttcattctgatcttcgataacggctacttctcagagtttggcaccttctctattactgactggatcggtcacacaccgaaagcgcttctcgccaagaactttaagctgcccgaaagcgcttttgatgggtttcccaaagatgaggtctattttgcacgtggcgcggttccaccagccacccctgcagcgcctttacagggacgcaagctgccaccactcacgcataaatacgaactcctcgaacaagaacctcataaagtttttaaaggtggtcgtgaatggcgcgtggatagcactcgttttcccatttccaagactgtaaccggcgttgttcttgatttggaacccggcgcgttacgcgagcttcactggcatcctaatgctgacgagtggcaatatgtgatcgatggcaacattagtgtgacgatgttcggttctcatggccgttatcgcaccgaacagatggagaagggtgatgtcgggtatattccacaggggtatggccacagcatcgaaaatgttggagatcgtccttgtcgcgtcttgattggctttaacacaggtaactaccaagcgatcgacttatcacagtggattgcaggtaatcccgcggatgttcttgccacgaacttctccaaacccaccagcctctttgaaaagttcccaaaacaggacgtgtttattgctcctggcaag

SEQ ID NO: 1550 - protein, 359 aa, synthetic construct
  REGION 1..359: note = Variant of oxalate decarboxylase from Gemmata sp. SH-PL17
MGDPTFMNNVPDPLLAGKDLPTFKFELEKSKGKVIGGSSGKEATVVQLPISKGIAGVSMVLEPGAMRELHWHATAAEWGFVLWGHVRTTVIDPQGLAETNDFGPGDVWYFPRGHGHMLECLGDKPAHFILIFDNGYFSEFGTFSITDWIGHTPKALLAKNFKLPESAFDGFPKDEVYFARGAVPPATPAAPLQGRKLPPLTHKYELLEQEPHKVFKGGREWRVDSTRFPISKTVTGVVLDLEPGALRELHWHPNADEWQYVIDGNISVTMFGSHGRYRTEQMEKGDVGYIPQGYGHSIENVGDRPCRVLIGFNTGNYQAIDLSQWIAGNPADVLATNFSKPTSLFEKFPKQDVFIAPGK

SEQ ID NO: 1551 - DNA, 1077 bp, synthetic construct
  misc_feature 1..1077: note = Variant of oxalate decarboxylase from Gemmata sp. SH-PL17
  source 1..1077: mol_type = other DNA
atgggtgaccctacctttatgaacaatgtaccagaccatctgctgtcgggcaaagatttgccgacgttcaagtttgaactggaaaagagcaagggcaaagtcattgggaaaagttcgggaaaagaagcaaccgttgtccagttacctatctccaaaggcattgctggtgtgagcatggtacttgaaccgggtgcgatgcgcgaattgcactggcatgccacagcagcagagtggggcttcgtattaactggccacgtccgtacgacggtgatcgatccacaaggtctggccgaaaccaacgactttggaccgggcgacgtgtggtattttcctcgcggtcatgggcacatgctggaatgcctgggcgataaaccggcgcatttcattctgatcttcgataacggctacttctcagagtttggcaccttctctattactgactggatcggtcacacaccgaaagcgcttctcgccaagaactttggcctgcccgaaagcgcttttgatgggtttcccaaaaaagaggtctattttgcacgtggcgcggttccaccagccacccctgcagcgcctttacagggactgaagctgccaccactcacgcataaatacgaactcctcgaacaagaacctcataaagtttttaaaggtggtcgtgaatggcgcgtggatagcactcgttttcccatttccaagactgtaaccggcgttgttcttgatttggaacccggcgcgttacgcgagcttcactggcatcctaatgctgacgagtggcaatatgtgatcgatggcaacattagtgtgacgatgttcggttctcatggccgtgtccgcaccgaacagatggagaagggtgatgtcgggtatattccacaggggtatggccacagcatcgaaaatgttggagatcgtccttgtcgcgtcttgattggctttaacacaggtaactaccaggcgatcgacttatcacagtggattgcaggtaatcccgcggatgttcttgccacgaacttctccaaacccaccagcctctttgaaaagttcccaaaacaggacgtgtttattgctcctggcaag

SEQ ID NO: 1552 - protein, 359 aa, synthetic construct
  REGION 1..359: note = Variant of oxalate decarboxylase from Gemmata sp. SH-PL17
MGDPTFMNNVPDHLLSGKDLPTFKFELEKSKGKVIGKSSGKEATVVQLPISKGIAGVSMVLEPGAMRELHWHATAAEWGFVLTGHVRTTVIDPQGLAETNDFGPGDVWYFPRGHGHMLECLGDKPAHFILIFDNGYFSEFGTFSITDWIGHTPKALLAKNFGLPESAFDGFPKKEVYFARGAVPPATPAAPLQGLKLPPLTHKYELLEQEPHKVFKGGREWRVDSTRFPISKTVTGVVLDLEPGALRELHWHPNADEWQYVIDGNISVTMFGSHGRVRTEQMEKGDVGYIPQGYGHSIENVGDRPCRVLIGFNTGNYQAIDLSQWIAGNPADVLATNFSKPTSLFEKFPKQDVFIAPGK

SEQ ID NO: 1553 - DNA, 1077 bp, synthetic construct
  misc_feature 1..1077: note = Variant of oxalate decarboxylase from Gemmata sp. SH-PL17
  source 1..1077: mol_type = other DNA
atgggtgaccctacctttatgaacaatgtaccagaccctctgctggcggacaaagatttgccgacgttcaagtttgagctggaaaagagcaagggcaaagtcattggggggagttcgggaaaagaagcaaccgttgtccagttacctatctccaaaggcattgctggtgtgagcatgacgcttgaaccgggtgcgatgcgcgaattgcactggcatgccacagcagcagagtgggggttcgtattatggggccacgtccgtacgacggtgatcgatccacaaggtctggccgaaaccaacgactttggaccgggcgacgtgtggtattttcctcgcggtcatgggcacatgctggaatgcctgggcgataaaccggcgcatttcattctgatcttcgataacggctacttctcagagtttggcaccttctctattactgactggatcggtcacacaccgaaagcgcttctcgccaagaactttaagctgcccgaaagcgcttttgatgggtttcccaaaaaagaggtctattttgcacgtggcgcggttccaccagccacccctgcagcgcctttacagggacgcaagctgccaccactcacgcataaatacgaactcctcgaacaagaacctcataaagtttttaaaggtggtcgtgaatggcgcgtggatagcactcgttttcccatttccaagactgtaaccggcgttgttcttgatttggaacccggcgcgttacgcgagcttcactggcatcctaatgctgacgagtggcaatatgtgatcgatggcaacattagtgtgacgatgttcggttctcatggccgtgtccgcaccgaacagatggagaagggtgatgtcgggtatattccacaggggtatggccacagcatcgaaaatgttggagatcgtccttgtcgcgtcttgattggctttaacacaggtaactaccaagcgatcgacttatcacagtggattgcaggtaatcccgcggatgttcttgccacgaacttctccaaacccaccagcctctttgaaaagttcccaaaacaggacgtgtttattgctcctggcaag

SEQ ID NO: 1554 - protein, 359 aa, synthetic construct
  REGION 1..359: note = Variant of oxalate decarboxylase from Gemmata sp. SH-PL17
MGDPTFMNNVPDPLLADKDLPTFKFELEKSKGKVIGGSSGKEATVVQLPISKGIAGVSMTLEPGAMRELHWHATAAEWGFVLWGHVRTTVIDPQGLAETNDFGPGDVWYFPRGHGHMLECLGDKPAHFILIFDNGYFSEFGTFSITDWIGHTPKALLAKNFKLPESAFDGFPKKEVYFARGAVPPATPAAPLQGRKLPPLTHKYELLEQEPHKVFKGGREWRVDSTRFPISKTVTGVVLDLEPGALRELHWHPNADEWQYVIDGNISVTMFGSHGRVRTEQMEKGDVGYIPQGYGHSIENVGDRPCRVLIGFNTGNYQAIDLSQWIAGNPADVLATNFSKPTSLFEKFPKQDVFIAPGK

SEQ ID NO: 1555 - DNA, 1077 bp, synthetic construct
  misc_feature 1..1077: note = Variant of oxalate decarboxylase from Gemmata sp. SH-PL17
  source 1..1077: mol_type = other DNA
atgggtgaccctacctttatgaacaatgtaccagaccatctgctgtcggacaaagatttgccgacgttcaagtttgaactggaaaagagcaagggcaaagtcattgggaaaagttcgggaaaagaagcaaccgttgtccagttacctatctccaaaggcattgctggtgtgagcatggtacttgaaccgggtgcgatgcgcgaattgcactggcatgccacagcagcagagtggggcttcgtattaactggccacgtccgtacgacggtgatcgatccacaaggtctggccgaaaccaacgactttggaccgggcgacgtgtggtattttcctcgcggtcatgggcacatgctggaatgcctgggcgataaaccggcgcatttcattctgatcttcgataacggctacttctcagagtttggcaccttctctattactgactggatcggtcacacaccgaaagcgcttctcgccaagaactttaagctgcccgaaagcgcttttgatgggtttcccaaaaaagaggtctattttgcacgtggcgcggttccaccagccacccctgcagcgcctttacagggactgaagctgccaccactcacgcataaatacgaactcctcgaacaagagcctcataaagtttttaaaggtggtcgtgaatggcgcgtggatagcactcgttttcccatttccaagactgtaaccggcgttgttcttgatttggaacccggcgcgttacgcgagcttcactggcatcctaatgctgacgagtggcaatatgtgatcgatggcaacattagtgtgacgatgttcggttctcatggccgtgtccgcaccgaacagatggagaagggtgatgtcgggtatattccacaggggtatggccacagcatcgaaaatgttggagatcgtccttgtcgcgtcttgattggctttaacacaggtaactaccaggcgatcgacttatcacagtggattgcaggtaatcccgcggatgttcttgccacgaacttctccaaacccaccagcctctttgaaaagttcccaaaacaggacgtgtttattgctcctggcaag

SEQ ID NO: 1556 - protein, 359 aa, synthetic construct
  REGION 1..359: note = Variant of oxalate decarboxylase from Gemmata sp. SH-PL17
MGDPTFMNNVPDHLLSDKDLPTFKFELEKSKGKVIGKSSGKEATVVQLPISKGIAGVSMVLEPGAMRELHWHATAAEWGFVLTGHVRTTVIDPQGLAETNDFGPGDVWYFPRGHGHMLECLGDKPAHFILIFDNGYFSEFGTFSITDWIGHTPKALLAKNFKLPESAFDGFPKKEVYFARGAVPPATPAAPLQGLKLPPLTHKYELLEQEPHKVFKGGREWRVDSTRFPISKTVTGVVLDLEPGALRELHWHPNADEWQYVIDGNISVTMFGSHGRVRTEQMEKGDVGYIPQGYGHSIENVGDRPCRVLIGFNTGNYQAIDLSQWIAGNPADVLATNFSKPTSLFEKFPKQDVFIAPGK

SEQ ID NO: 1557 - DNA, 1077 bp, synthetic construct
  misc_feature 1..1077: note = Variant of oxalate decarboxylase from Gemmata sp. SH-PL17
  source 1..1077: mol_type = other DNA
atgggtgaccctacctttatgaacaatgtaccagaccctctgctgtcgggcaaagatttgccgacgttcaagtttgagctggaaaagagcgagggcaaagtcattgggaaaagttcgggaaaagaagcaaccgttgtccagttacctatctccaaaggcattgctggtgtgagcatggtacttgaaccgggtgcgatgcgcgaattgcactggcatgccacagcagcagagtgggggttcgtattatggggccacgtccgtacgacggtgatcgatccacaaggtctggccgaaaccaacgactttggaccgggcgacgtgtggtattttcctcgcggtcatgggcacatgctggaatgcctgggcgataaaccggcgcatttcattctgatcttcgataacggctacttctcagagtttggcaccttctctattactgactggatcggtcacacaccgaaagcgcttctcgccaagaactttggcctgcccgaaagcgcttttgatgggtttcccaaagatgaggtctattttgcacgtggcgcggttccaccagccacccctgcagcgcctttacagggactgaagctgccaccactcacgcataaatacgaactcctcgaacaagagcctcataaagtttttaaaggtggtcgtgaatggcgcgtggatagcactcgttttcccatttccaagactgtaaccggcgttgttcttgatttggaacccggcgcgttacgcgagcttcactggcatcctaatgctgacgagtggcaatatgtgatcgatggcaacattagtgtgacgatgttcggttctcatggccgtgtccgcaccgaacagatggagaagggtgatgtcgggtatattccacaggggtatggccacagcatcgaaaatgttggagatcgtccttgtcgcgtcttgattggctttaacacaggtaactacgaggcgatcgacttatcacagtggattgcaggtaatcccgcggatgttcttgccacgaacttctccaaacccaccagcctctttgaaaagttcccaaaacaggacgtgtttattgctcctggcaag

SEQ ID NO: 1558 - protein, 359 aa, synthetic construct
  REGION 1..359: note = Variant of oxalate decarboxylase from Gemmata sp. SH-PL17
MGDPTFMNNVPDPLLSGKDLPTFKFELEKSEGKVIGKSSGKEATVVQLPISKGIAGVSMVLEPGAMRELHWHATAAEWGFVLWGHVRTTVIDPQGLAETNDFGPGDVWYFPRGHGHMLECLGDKPAHFILIFDNGYFSEFGTFSITDWIGHTPKALLAKNFGLPESAFDGFPKDEVYFARGAVPPATPAAPLQGLKLPPLTHKYELLEQEPHKVFKGGREWRVDSTRFPISKTVTGVVLDLEPGALRELHWHPNADEWQYVIDGNISVTMFGSHGRVRTEQMEKGDVGYIPQGYGHSIENVGDRPCRVLIGFNTGNYEAIDLSQWIAGNPADVLATNFSKPTSLFEKFPKQDVFIAPGK

SEQ ID NO: 1559 - DNA, 1077 bp, synthetic construct
  misc_feature 1..1077: note = Variant of oxalate decarboxylase from Gemmata sp. SH-PL17
  source 1..1077: mol_type = other DNA
atgggtgaccctacctttatgaacaatgtaccagaccatctgctggcgggcaaagatttgccgacgttcaagtttgaactggaaaagagcgagggcaaagtcattgggggcagttcgggaaaagaagcaaccgttgtccagttacctatctccaaaggcattgctggtgtgagcatggtacttgaaccgggtgcgatgcgcgaattgcactggcatgccacagcagcagagtggggcttcgtattaactggccacgtccgtacgacggtgatcgatccacaaggtctggccgaaaccaacgactttggaccgggcgacgtgtggtattttcctcgcggtcatgggcacatgctggaatgcctgggcgataaaccggcgcatttcattctgatcttcgataacggctacttctcagagtttggcaccttctctattactgactggatcggtcacacaccgaaagcgcttctcgccaagaactttggcctgcccgaaagcgcttttgatgggtttcccaaaaaagaggtctattttgcacgtggcgcggttccaccagccacccctgcagcgcctttacagggactgaagctgccaccactcacgcataaatacgaactcctcgaacaagagcctcataaagtttttaaaggtggtcgtgaatggcgcgtggatagcactcgttttcccatttccaagactgtaaccggcgttgttcttgatttggaacccggcgcgttacgcgagcttcactggcatcctaatgctgacgagtggcaatatgtgatcgatggcaacattagtgtgacgatgttcggttctcatggccgtgtccgcaccgaacagatggagaagggtgatgtcgggtatattccacaggggtatggccacagcatcgaaaatgttggagatcgtccttgtcgcgtcttgattggctttaacacaggtaactaccaggcgatcgacttatcacagtggattgcaggtaatcccgcggatgttcttgccacgaacttctccaaacccaccagcctctttgaaaagttcccaaaacaggacgtgtttattgctcctggcaag

SEQ ID NO: 1560 - protein, 359 aa, synthetic construct
  REGION 1..359: note = Variant of oxalate decarboxylase from Gemmata sp. SH-PL17
MGDPTFMNNVPDHLLAGKDLPTFKFELEKSEGKVIGGSSGKEATVVQLPISKGIAGVSMVLEPGAMRELHWHATAAEWGFVLTGHVRTTVIDPQGLAETNDFGPGDVWYFPRGHGHMLECLGDKPAHFILIFDNGYFSEFGTFSITDWIGHTPKALLAKNFGLPESAFDGFPKKEVYFARGAVPPATPAAPLQGLKLPPLTHKYELLEQEPHKVFKGGREWRVDSTRFPISKTVTGVVLDLEPGALRELHWHPNADEWQYVIDGNISVTMFGSHGRVRTEQMEKGDVGYIPQGYGHSIENVGDRPCRVLIGFNTGNYQAIDLSQWIAGNPADVLATNFSKPTSLFEKFPKQDVFIAPGK

SEQ ID NO: 1561 - DNA, 1077 bp, synthetic construct
  misc_feature 1..1077: note = Variant of oxalate decarboxylase from Gemmata sp. SH-PL17
  source 1..1077: mol_type = other DNA
atgggtgaccctacctttatgaacaatgtaccagaccctctgctggcgggcaaagatttgccgacgttcaagtttgagctggaaaagagcaagggcaaagtcattggggggagttcgggaaaagaagcaaccgttgtccagttacctatctccaaaggcattgctggtgtgagcatgacgcttgaaccgggtgcgatgcgcgaattgcactggcatgccacagcagcagagtgggggttcgtattatggggccacgtccgtacgacggtgatcgatccacaaggtctggccgaaaccaacgactttggaccgggcgacgtgtggtattttcctcgcggtcatgggcacatgctggaatgcctgggcgataaaccggcgcatttcattctgatcttcgataacggctacttctcagagtttggcaccttctctattactgactggatcggtcacacaccgaaagcgcttctcgccaagaactttaagctgcccgaaagcgcttttgatgggtttcccaaagatgaggtctattttgcacgtggcgcggttccaccagccacccctgcagcgcctttacagggacgcaagctgccaccactcacgcataaatacgaactcctcgaacaagaacctcataaagtttttaaaggtggtcgtgaatggcgcgtggatagcactcgttttcccatttccaagactgtaaccggcgttgttcttgatttggaacccggcgcgttacgcgagcttcactggcatcctaatgctgacgagtggcaatatgtgatcgatggcaacattagtgtgacgatgttcggttctcatggccgtgtccgcaccgaacagatggagaagggtgatgtcgggtatattccacaggggtatggccacagcatcgaaaatgttggagatcgtccttgtcgcgtcttgattggctttaacacaggtaactacgaggcgatcgacttatcacagtggattgcaggtaatcccgcggatgttcttgccacgaacttctccaaacccaccagcctctttgaaaagttcccaaaacaggacgtgtttattgctcctggcaag

SEQ ID NO: 1562 - protein, 359 aa, synthetic construct
  REGION 1..359: note = Variant of oxalate decarboxylase from Gemmata sp. SH-PL17
MGDPTFMNNVPDPLLAGKDLPTFKFELEKSKGKVIGGSSGKEATVVQLPISKGIAGVSMTLEPGAMRELHWHATAAEWGFVLWGHVRTTVIDPQGLAETNDFGPGDVWYFPRGHGHMLECLGDKPAHFILIFDNGYFSEFGTFSITDWIGHTPKALLAKNFKLPESAFDGFPKDEVYFARGAVPPATPAAPLQGRKLPPLTHKYELLEQEPHKVFKGGREWRVDSTRFPISKTVTGVVLDLEPGALRELHWHPNADEWQYVIDGNISVTMFGSHGRVRTEQMEKGDVGYIPQGYGHSIENVGDRPCRVLIGFNTGNYEAIDLSQWIAGNPADVLATNFSKPTSLFEKFPKQDVFIAPGK

SEQ ID NO: 1563 - DNA, 1077 bp, synthetic construct
  misc_feature 1..1077: note = Variant of oxalate decarboxylase from Gemmata sp. SH-PL17
  source 1..1077: mol_type = other DNA
atgggtgaccctacctttatgaacaatgtaccagaccctctgctgtcggacaaagatttgccgacgttcaagtttgagctggaaaagagcaagggcaaagtcattggggggagttcgggaaaagaagcaaccgttgtccagttacctatctccaaaggcattgctggtgtgagcatgacgcttgaaccgggtgcgatgcgcgaattgcactggcatgccacagcagcagagtgggggttcgtattatggggccacgtccgtacgacggtgatcgatccacaaggtgcagccgaaaccaacgactttggaccgggcgacgtgtggtattttcctcgcggtcatgggcacatgctggaatgcctgggcgataaaccggcgcatttcattctgatcttcgataacggctacttctcagagtttggcaccttctctattactgactggatcggtcacacaccgaaagcgcttctcgccaagaactttggcctgcccgaaagcgcttttgatgggtttcccaaaaaagaggtctattttgcacgtggcgcggttccaccagccacccctgcagcgcctttacagggacgcaagctgccaccactcacgcataaatacgaactcctcgaacaagaacctcataaagtttttaaaggtggtcgtgaatggcgcgtggatagcactcgttttcccatttccaagactgtaaccggcgttgttcttgatttggaacccggcgcgttacgcgagcttcactggcatcctaatgctgacgagtggcaatatgtgatcgatggcaacattagtgtgacgatgttcggttctcatggccgttaccgcaccgaacagatggagaagggtgatgtcgggtatattccacaggggtatggccacagcatcgaaaatgttggagatcgtccttgtcgcgtcttgattggctttaacacaggtaactaccaagcgatcgacttatcacagtggattgcaggtaatcccgcggatgttcttgccacgaacttctccaaacccaccagcctctttgaaaagttcccaaaacaggacgtgtttattgctcctggcaag

SEQ ID NO: 1564 - protein, 359 aa, synthetic construct
  REGION 1..359: note = Variant of oxalate decarboxylase from Gemmata sp. SH-PL17
MGDPTFMNNVPDPLLSDKDLPTFKFELEKSKGKVIGGSSGKEATVVQLPISKGIAGVSMTLEPGAMRELHWHATAAEWGFVLWGHVRTTVIDPQGAAETNDFGPGDVWYFPRGHGHMLECLGDKPAHFILIFDNGYFSEFGTFSITDWIGHTPKALLAKNFGLPESAFDGFPKKEVYFARGAVPPATPAAPLQGRKLPPLTHKYELLEQEPHKVFKGGREWRVDSTRFPISKTVTGVVLDLEPGALRELHWHPNADEWQYVIDGNISVTMFGSHGRYRTEQMEKGDVGYIPQGYGHSIENVGDRPCRVLIGFNTGNYQAIDLSQWIAGNPADVLATNFSKPTSLFEKFPKQDVFIAPGK

SEQ ID NO: 1565 - DNA, 1077 bp, synthetic construct
  misc_feature 1..1077: note = Variant of oxalate decarboxylase from Gemmata sp. SH-PL17
  source 1..1077: mol_type = other DNA
atgggtgaccctacctttatgaacaatgtaccagaccatctgctgtcgggcaaagatttgccgacgttcaagtttgcactggaaaagagcaagggcaaagtcattgggggcagttcgggaaaagaagcaaccgttgtccagttacctatctccaaaggcattgctggtgtgagcatgacgcttgaaccgggtgcgatgcgcgaattgcactggcatgccacagcagcagagtggggcttcgtattaactggccacgtccgtacgacggtgatcgatccacaaggtctggccgaaaccaacgactttggaccgggcgacgtgtggtattttcctcgcggtcatgggcacatgctggaatgcctgggcgataaaccggcgcatttcattctgatcttcgataacggctacttctcagagtttggcaccttctctattactgactggatcggtcacacaccgaaagcgcttctcgccaagaactttggcctgcccgaaagcgcttttgatgggtttcccaaagatgaggtctattttgcacgtggcgcggttccaccagccacccctgcagcgcctttacagggactgaagctgccaccactcacgcataaatacgaactcctcgaacaagagcctcataaagtttttaaaggtggtcgtgaatggcgcgtggatagcactcgttttcccatttccaagactgtaaccggcgttgttcttgatttggaacccggcgcgttacgcgagcttcactggcatcctaatgctgacgagtggcaatatgtgatcgatggcaacattagtgtgacgatgttcggttctcatggccgtgtccgcaccgaacagatggagaagggtgatgtcgggtatattccacaggggtatggccacagcatcgaaaatgttggagatcgtccttgtcgcgtcttgattggctttaacacaggtaactaccaagcgatcgacttatcacagtggattgcaggtaatcccgcggatgttcttgccacgaacttctccaaacccaccagcctctttgaaaagttcccaaaacaggacgtgtttattgctcctggcaag

SEQ ID NO: 1566 - protein, 359 aa, synthetic construct
  REGION 1..359: note = Variant of oxalate decarboxylase from Gemmata sp. SH-PL17
MGDPTFMNNVPDHLLSGKDLPTFKFALEKSKGKVIGGSSGKEATVVQLPISKGIAGVSMTLEPGAMRELHWHATAAEWGFVLTGHVRTTVIDPQGLAETNDFGPGDVWYFPRGHGHMLECLGDKPAHFILIFDNGYFSEFGTFSITDWIGHTPKALLAKNFGLPESAFDGFPKDEVYFARGAVPPATPAAPLQGLKLPPLTHKYELLEQEPHKVFKGGREWRVDSTRFPISKTVTGVVLDLEPGALRELHWHPNADEWQYVIDGNISVTMFGSHGRVRTEQMEKGDVGYIPQGYGHSIENVGDRPCRVLIGFNTGNYQAIDLSQWIAGNPADVLATNFSKPTSLFEKFPKQDVFIAPGK

SEQ ID NO: 1567 - DNA, 1077 bp, synthetic construct
  misc_feature 1..1077: note = Variant of oxalate decarboxylase from Gemmata sp. SH-PL17
  source 1..1077: mol_type = other DNA
atgggtgaccctacctttatgaacaatgtaccagaccctctgctgtcggacaaagatttgccgacgttcaagtttgaactggaaaagagcgagggcaaagtcattgggggcagttcgggaaaagaagcaaccgttgtccagttacctatctccaaaggcattgctggtgtgagcatgacgcttgaaccgggtgcgatgcgcgaattgcactggcatgccacagcagcagagtggggcttcgtattatggggccacgtccgtacgacggtgatcgatccacaaggtctggccgaaaccaacgactttggaccgggcgacgtgtggtattttcctcgcggtcatgggcacatgctggaatgcctgggcgataaaccggcgcatttcattctgatcttcgataacggctacttctcagagtttggcaccttctctattactgactggatcggtcacacaccgaaagcgcttctcgccaagaactttggcctgcccgaaagcgcttttgatgggtttcccaaagatgaggtctattttgcacgtggcgcggttccaccagccacccctgcagcgcctttacagggactgaagctgccaccactcacgcataaatacgaactcctcgaacaagaacctcataaagtttttaaaggtggtcgtgaatggcgcgtggatagcactcgttttcccatttccaagactgtaaccggcgttgttcttgatttggaacccggcgcgttacgcgagcttcactggcatcctaatgctgacgagtggcaatatgtgatcgatggcaacattagtgtgacgatgttcggttctcatggccgttatcgcaccgaacagatggagaagggtgatgtcgggtatattccacaggggtatggccacagcatcgaaaatgttggagatcgtccttgtcgcgtcttgattggctttaacacaggtaactaccaggcgatcgacttatcacagtggattgcaggtaatcccgcggatgttcttgccacgaacttctccaaacccaccagcctctttgaaaagttcccaaaacaggacgtgtttattgctcctggcaag

SEQ ID NO: 1568 - protein, 359 aa, synthetic construct
  REGION 1..359: note = Variant of oxalate decarboxylase from Gemmata sp. SH-PL17
MGDPTFMNNVPDPLLSDKDLPTFKFELEKSEGKVIGGSSGKEATVVQLPISKGIAGVSMTLEPGAMRELHWHATAAEWGFVLWGHVRTTVIDPQGLAETNDFGPGDVWYFPRGHGHMLECLGDKPAHFILIFDNGYFSEFGTFSITDWIGHTPKALLAKNFGLPESAFDGFPKDEVYFARGAVPPATPAAPLQGLKLPPLTHKYELLEQEPHKVFKGGREWRVDSTRFPISKTVTGVVLDLEPGALRELHWHPNADEWQYVIDGNISVTMFGSHGRYRTEQMEKGDVGYIPQGYGHSIENVGDRPCRVLIGFNTGNYQAIDLSQWIAGNPADVLATNFSKPTSLFEKFPKQDVFIAPGK

SEQ ID NO: 1569 - DNA, 1077 bp, synthetic construct
  misc_feature 1..1077: note = Variant of oxalate decarboxylase from Gemmata sp. SH-PL17
  source 1..1077: mol_type = other DNA
atgggtgaccctacctttatgaacaatgtaccagaccctctgctggcggacaaagatttgccgacgttcaagtttgcactggaaaagagcaagggcaaagtcattgggggcagttcgggaaaagaagcaaccgttgtccagttacctatctccaaaggcattgctggtgtgagcatggtacttgaaccgggtgcgatgcgcgaattgcactggcatgccacagcagcagagtggggcttcgtattaactggccacgtccgtacgacggtgatcgatccacaaggtgcagccgaaaccaacgactttggaccgggcgacgtgtggtattttcctcgcggtcatgggcacatgctggaatgcctgggcgataaaccggcgcatttcattctgatcttcgataacggctacttctcagagtttggcaccttctctattactgactggatcggtcacacaccgaaagcgcttctcgccaagaactttaagctgcccgaaagcgcttttgatgggtttcccaaaaaggaggtctattttgcacgtggcgcggttccaccagccacccctgcagcgcctttacagggactgaagctgccaccactcacgcataaatacgaactcctcgaacaagagcctcataaagtttttaaaggtggtcgtgaatggcgcgtggatagcactcgttttcccatttccaagactgtaaccggcgttgttcttgatttggaacccggcgcgttacgcgagcttcactggcatcctaatgctgacgagtggcaatatgtgatcgatggcaacattagtgtgacgatgttcggttctcatggccgttatcgcaccgaacagatggagaagggtgatgtcgggtatattccacaggggtatggccacagcatcgaaaatgttggagatcgtccttgtcgcgtcttgattggctttaacacaggtaactaccaggcgatcgacttatcacagtggattgcaggtaatcccgcggatgttcttgccacgaacttctccaaacccaccagcctctttgaaaagttcccaaaacaggacgtgtttattgctcctggcaag

SEQ ID NO: 1570 - protein, 359 aa, synthetic construct
  REGION 1..359: note = Variant of oxalate decarboxylase from Gemmata sp. SH-PL17
MGDPTFMNNVPDPLLADKDLPTFKFALEKSKGKVIGGSSGKEATVVQLPISKGIAGVSMVLEPGAMRELHWHATAAEWGFVLTGHVRTTVIDPQGAAETNDFGPGDVWYFPRGHGHMLECLGDKPAHFILIFDNGYFSEFGTFSITDWIGHTPKALLAKNFKLPESAFDGFPKKEVYFARGAVPPATPAAPLQGLKLPPLTHKYELLEQEPHKVFKGGREWRVDSTRFPISKTVTGVVLDLEPGALRELHWHPNADEWQYVIDGNISVTMFGSHGRYRTEQMEKGDVGYIPQGYGHSIENVGDRPCRVLIGFNTGNYQAIDLSQWIAGNPADVLATNFSKPTSLFEKFPKQDVFIAPGK

SEQ ID NO: 1571 - DNA, 1077 bp, synthetic construct
  misc_feature 1..1077: note = Variant of oxalate decarboxylase from Gemmata sp. SH-PL17
  source 1..1077: mol_type = other DNA
atgggtgaccctacctttatgaacaatgtaccagaccctctgctgtcggacaaagatttgccgacgttcaagtttgcactggaaaagagcaagggcaaagtcattgggaaaagttcgggaaaagaagcaaccgttgtccagttacctatctccaaaggcattgctggtgtgagcatggtacttgaaccgggtgcgatgcgcgaattgcactggcatgccacagcagcagagtggggcttcgtattatggggccacgtccgtacgacggtgatcgatccacaaggtctggccgaaaccaacgactttggaccgggcgacgtgtggtattttcctcgcggtcatgggcacatgctggaatgcctgggcgataaaccggcgcatttcattctgatcttcgataacggctacttctcagagtttggcaccttctctattactgactggatcggtcacacaccgaaagcgcttctcgccaagaactttaagctgcccgaaagcgcttttgatgggtttcccaaagatgaggtctattttgcacgtggcgcggttccaccagccacccctgcagcgcctttacagggactgaagctgccaccactcacgcataaatacgaactcctcgaacaagaacctcataaagtttttaaaggtggtcgtgaatggcgcgtggatagcactcgttttcccatttccaagactgtaaccggcgttgttcttgatttggaacccggcgcgttacgcgagcttcactggcatcctaatgctgacgagtggcaatatgtgatcgatggcaacattagtgtgacgatgttcggttctcatggccgttatcgcaccgaacagatggagaagggtgatgtcgggtatattccacaggggtatggccacagcatcgaaaatgttggagatcgtccttgtcgcgtcttgattggctttaacacaggtaactacgaggcgatcgacttatcacagtggattgcaggtaatcccgcggatgttcttgccacgaacttctccaaacccaccagcctctttgaaaagttcccaaaacaggacgtgtttattgctcctggcaag

SEQ ID NO: 1572 - protein, 359 aa, synthetic construct
  REGION 1..359: note = Variant of oxalate decarboxylase from Gemmata sp. SH-PL17
MGDPTFMNNVPDPLLSDKDLPTFKFALEKSKGKVIGKSSGKEATVVQLPISKGIAGVSMVLEPGAMRELHWHATAAEWGFVLWGHVRTTVIDPQGLAETNDFGPGDVWYFPRGHGHMLECLGDKPAHFILIFDNGYFSEFGTFSITDWIGHTPKALLAKNFKLPESAFDGFPKDEVYFARGAVPPATPAAPLQGLKLPPLTHKYELLEQEPHKVFKGGREWRVDSTRFPISKTVTGVVLDLEPGALRELHWHPNADEWQYVIDGNISVTMFGSHGRYRTEQMEKGDVGYIPQGYGHSIENVGDRPCRVLIGFNTGNYEAIDLSQWIAGNPADVLATNFSKPTSLFEKFPKQDVFIAPGK

SEQ ID NO: 1573 - DNA, 1077 bp, synthetic construct
  misc_feature 1..1077: note = Variant of oxalate decarboxylase from Gemmata sp. SH-PL17
  source 1..1077: mol_type = other DNA
atgggtgaccctacctttatgaacaatgtaccagaccatctgctggcgggcaaagatttgccgacgttcaagtttgaactggaaaagagcgagggcaaagtcattgggggcagttcgggaaaagaagcaaccgttgtccagttacctatctccaaaggcattgctggtgtgagcatgacgcttgaaccgggtgcgatgcgcgaattgcactggcatgccacagcagcagagtggggcttcgtattatggggccacgtccgtacgacggtgatcgatccacaaggtctggccgaaaccaacgactttggaccgggcgacgtgtggtattttcctcgcggtcatgggcacatgctggaatgcctgggcgataaaccggcgcatttcattctgatcttcgataacggctacttctcagagtttggcaccttctctattactgactggatcggtcacacaccgaaagcgcttctcgccaagaactttggcctgcccgaaagcgcttttgatgggtttcccaaagatgaggtctattttgcacgtggcgcggttccaccagccacccctgcagcgcctttacagggactgaagctgccaccactcacgcataaatacgaactcctcgaacaagaacctcataaagtttttaaaggtggtcgtgaatggcgcgtggatagcactcgttttcccatttccaagactgtaaccggcgttgttcttgatttggaacccggcgcgttacgcgagcttcactggcatcctaatgctgacgagtggcaatatgtgatcgatggcaacattagtgtgacgatgttcggttctcatggccgtgtccgcaccgaacagatggagaagggtgatgtcgggtatattccacaggggtatggccacagcatcgaaaatgttggagatcgtccttgtcgcgtcttgattggctttaacacaggtaactaccaagcgatcgacttatcacagtggattgcaggtaatcccgcggatgttcttgccacgaacttctccaaacccaccagcctctttgaaaagttcccaaaacaggacgtgtttattgctcctggcaag

SEQ ID NO: 1574 - protein, 359 aa, synthetic construct
  REGION 1..359: note = Variant of oxalate decarboxylase from Gemmata sp. SH-PL17
MGDPTFMNNVPDHLLAGKDLPTFKFELEKSEGKVIGGSSGKEATVVQLPISKGIAGVSMTLEPGAMRELHWHATAAEWGFVLWGHVRTTVIDPQGLAETNDFGPGDVWYFPRGHGHMLECLGDKPAHFILIFDNGYFSEFGTFSITDWIGHTPKALLAKNFGLPESAFDGFPKDEVYFARGAVPPATPAAPLQGLKLPPLTHKYELLEQEPHKVFKGGREWRVDSTRFPISKTVTGVVLDLEPGALRELHWHPNADEWQYVIDGNISVTMFGSHGRVRTEQMEKGDVGYIPQGYGHSIENVGDRPCRVLIGFNTGNYQAIDLSQWIAGNPADVLATNFSKPTSLFEKFPKQDVFIAPGK

SEQ ID NO: 1575 - DNA, 1077 bp, synthetic construct
  misc_feature 1..1077: note = Variant of oxalate decarboxylase from Gemmata sp. SH-PL17
  source 1..1077: mol_type = other DNA
atgggtgaccctacctttatgaacaatgtaccagaccatctgctgtcggacaaagatttgccgacgttcaagtttgaactggaaaagagcgagggcaaagtcattggggggagttcgggaaaagaagcaaccgttgtccagttacctatctccaaaggcattgctggtgtgagcatggtacttgaaccgggtgcgatgcgcgaattgcactggcatgccacagcagcagagtggggcttcgtattaactggccacgtccgtacgacggtgatcgatccacaaggtctggccgaaaccaacgactttggaccgggcgacgtgtggtattttcctcgcggtcatgggcacatgctggaatgcctgggcgataaaccggcgcatttcattctgatcttcgataacggctacttctcagagtttggcaccttctctattactgactggatcggtcacacaccgaaagcgcttctcgccaagaactttaagctgcccgaaagcgcttttgatgggtttcccaaaaaggaggtctattttgcacgtggcgcggttccaccagccacccctgcagcgcctttacagggactgaagctgccaccactcacgcataaatacgaactcctcgaacaagagcctcataaagtttttaaaggtggtcgtgaatggcgcgtggatagcactcgttttcccatttccaagactgtaaccggcgttgttcttgatttggaacccggcgcgttacgcgagcttcactggcatcctaatgctgacgagtggcaatatgtgatcgatggcaacattagtgtgacgatgttcggttctcatggccgttatcgcaccgaacagatggagaagggtgatgtcgggtatattccacaggggtatggccacagcatcgaaaatgttggagatcgtccttgtcgcgtcttgattggctttaacacaggtaactacgaggcgatcgacttatcacagtggattgcaggtaatcccgcggatgttcttgccacgaacttctccaaacccaccagcctctttgaaaagttcccaaaacaggacgtgtttattgctcctggcaag

SEQ ID NO: 1576 - protein, 359 aa, synthetic construct
  REGION 1..359: note = Variant of oxalate decarboxylase from Gemmata sp. SH-PL17
MGDPTFMNNVPDHLLSDKDLPTFKFELEKSEGKVIGGSSGKEATVVQLPISKGIAGVSMVLEPGAMRELHWHATAAEWGFVLTGHVRTTVIDPQGLAETNDFGPGDVWYFPRGHGHMLECLGDKPAHFILIFDNGYFSEFGTFSITDWIGHTPKALLAKNFKLPESAFDGFPKKEVYFARGAVPPATPAAPLQGLKLPPLTHKYELLEQEPHKVFKGGREWRVDSTRFPISKTVTGVVLDLEPGALRELHWHPNADEWQYVIDGNISVTMFGSHGRYRTEQMEKGDVGYIPQGYGHSIENVGDRPCRVLIGFNTGNYEAIDLSQWIAGNPADVLATNFSKPTSLFEKFPKQDVFIAPGK

SEQ ID NO: 1577 - DNA, 1077 bp, synthetic construct
  misc_feature 1..1077: note = Variant of oxalate decarboxylase from Gemmata sp. SH-PL17
  source 1..1077: mol_type = other DNA
atgggtgaccctacctttatgaacaatgtaccagaccatctgctggcggacaaagatttgccgacgttcaagtttgaactggaaaagagcgagggcaaagtcattgggggcagttcgggaaaagaagcaaccgttgtccagttacctatctccaaaggcattgctggtgtgagcatggtacttgaaccgggtgcgatgcgcgaattgcactggcatgccacagcagcagagtggggcttcgtattaactggccacgtccgtacgacggtgatcgatccacaaggtctggccgaaaccaacgactttggaccgggcgacgtgtggtattttcctcgcggtcatgggcacatgctggaatgcctgggcgataaaccggcgcatttcattctgatcttcgataacggctacttctcagagtttggcaccttctctattactgactggatcggtcacacaccgaaagcgcttctcgccaagaactttggcctgcccgaaagcgcttttgatgggtttcccaaaaaagaggtctattttgcacgtggcgcggttccaccagccacccctgcagcgcctttacagggactgaagctgccaccactcacgcataaatacgaactcctcgaacaagaacctcataaagtttttaaaggtggtcgtgaatggcgcgtggatagcactcgttttcccatttccaagactgtaaccggcgttgttcttgatttggaacccggcgcgttacgcgagcttcactggcatcctaatgctgacgagtggcaatatgtgatcgatggcaacattagtgtgacgatgttcggttctcatggccgtgtccgcaccgaacagatggagaagggtgatgtcgggtatattccacaggggtatggccacagcatcgaaaatgttggagatcgtccttgtcgcgtcttgattggctttaacacaggtaactacgaggcgatcgacttatcacagtggattgcaggtaatcccgcggatgttcttgccacgaacttctccaaacccaccagcctctttgaaaagttcccaaaacaggacgtgtttattgctcctggcaag

SEQ ID NO: 1578 - protein, 359 aa, synthetic construct
  REGION 1..359: note = Variant of oxalate decarboxylase from Gemmata sp. SH-PL17
MGDPTFMNNVPDHLLADKDLPTFKFELEKSEGKVIGGSSGKEATVVQLPISKGIAGVSMVLEPGAMRELHWHATAAEWGFVLTGHVRTTVIDPQGLAETNDFGPGDVWYFPRGHGHMLECLGDKPAHFILIFDNGYFSEFGTFSITDWIGHTPKALLAKNFGLPESAFDGFPKKEVYFARGAVPPATPAAPLQGLKLPPLTHKYELLEQEPHKVFKGGREWRVDSTRFPISKTVTGVVLDLEPGALRELHWHPNADEWQYVIDGNISVTMFGSHGRVRTEQMEKGDVGYIPQGYGHSIENVGDRPCRVLIGFNTGNYEAIDLSQWIAGNPADVLATNFSKPTSLFEKFPKQDVFIAPGK

SEQ ID NO: 1579 - DNA, 1077 bp, synthetic construct
  misc_feature 1..1077: note = Variant of oxalate decarboxylase from Gemmata sp. SH-PL17
  source 1..1077: mol_type = other DNA
atgggtgaccctacctttatgaacaatgtaccagaccatctgctggcgggcaaagatttgccgacgttcaagtttgagctggaaaagagcaagggcaaagtcattggggggagttcgggaaaagaagcaaccgttgtccagttacctatctccaaaggcattgctggtgtgagcatgacgcttgaaccgggtgcgatgcgcgaattgcactggcatgccacagcagcagagtggggcttcgtattaactggccacgtccgtacgacggtgatcgatccacaaggtctggccgaaaccaacgactttggaccgggcgacgtgtggtattttcctcgcggtcatgggcacatgctggaatgcctgggcgataaaccggcgcatttcattctgatcttcgataacggctacttctcagagtttggcaccttctctattactgactggatcggtcacacaccgaaagcgcttctcgccaagaactttggcctgcccgaaagcgcttttgatgggtttcccaaaaaagaggtctattttgcacgtggcgcggttccaccagccacccctgcagcgcctttacagggacgcaagctgccaccactcacgcataaatacgaactcctcgaacaagaacctcataaagtttttaaaggtggtcgtgaatggcgcgtggatagcactcgttttcccatttccaagactgtaaccggcgttgttcttgatttggaacccggcgcgttacgcgagcttcactggcatcctaatgctgacgagtggcaatatgtgatcgatggcaacattagtgtgacgatgttcggttctcatggccgtgtccgcaccgaacagatggagaagggtgatgtcgggtatattccacaggggtatggccacagcatcgaaaatgttggagatcgtccttgtcgcgtcttgattggctttaacacaggtaactacgaggcgatcgacttatcacagtggattgcaggtaatcccgcggatgttcttgccacgaacttctccaaacccaccagcctctttgaaaagttcccaaaacaggacgtgtttattgctcctggcaag

SEQ ID NO: 1580 - protein, 359 aa, synthetic construct
  REGION 1..359: note = Variant of oxalate decarboxylase from Gemmata sp. SH-PL17
MGDPTFMNNVPDHLLAGKDLPTFKFELEKSKGKVIGGSSGKEATVVQLPISKGIAGVSMTLEPGAMRELHWHATAAEWGFVLTGHVRTTVIDPQGLAETNDFGPGDVWYFPRGHGHMLECLGDKPAHFILIFDNGYFSEFGTFSITDWIGHTPKALLAKNFGLPESAFDGFPKKEVYFARGAVPPATPAAPLQGRKLPPLTHKYELLEQEPHKVFKGGREWRVDSTRFPISKTVTGVVLDLEPGALRELHWHPNADEWQYVIDGNISVTMFGSHGRVRTEQMEKGDVGYIPQGYGHSIENVGDRPCRVLIGFNTGNYEAIDLSQWIAGNPADVLATNFSKPTSLFEKFPKQDVFIAPGK

SEQ ID NO: 1581 - DNA, 1077 bp, synthetic construct
  misc_feature 1..1077: note = Variant of oxalate decarboxylase from Gemmata sp. SH-PL17
  source 1..1077: mol_type = other DNA
atgggtgaccctacctttatgaacaatgtaccagaccatctgctggcggacaaagatttgccgacgttcaagtttgaactggaaaagagcgagggcaaagtcattgggaaaagttcgggaaaagaagcaaccgttgtccagttacctatctccaaaggcattgctggtgtgagcatggtacttgaaccgggtgcgatgcgcgaattgcactggcatgccacagcagcagagtggggcttcgtattaactggccacgtccgtacgacggtgatcgatccacaaggtgcagccgaaaccaacgactttggaccgggcgacgtgtggtattttcctcgcggtcatgggcacatgctggaatgcctgggcgataaaccggcgcatttcattctgatcttcgataacggctacttctcagagtttggcaccttctctattactgactggatcggtcacacaccgaaagcgcttctcgccaagaactttggcctgcccgaaagcgcttttgatgggtttcccaaaaaggaggtctattttgcacgtggcgcggttccaccagccacccctgcagcgcctttacagggactgaagctgccaccactcacgcataaatacgaactcctcgaacaagaacctcataaagtttttaaaggtggtcgtgaatggcgcgtggatagcactcgttttcccatttccaagactgtaaccggcgttgttcttgatttggaacccggcgcgttacgcgagcttcactggcatcctaatgctgacgagtggcaatatgtgatcgatggcaacattagtgtgacgatgttcggttctcatggccgtgtccgcaccgaacagatggagaagggtgatgtcgggtatattccacaggggtatggccacagcatcgaaaatgttggagatcgtccttgtcgcgtcttgattggctttaacacaggtaactaccaggcgatcgacttatcacagtggattgcaggtaatcccgcggatgttcttgccacgaacttctccaaacccaccagcctctttgaaaagttcccaaaacaggacgtgtttattgctcctggcaag

SEQ ID NO: 1582 - protein, 359 aa, synthetic construct
  REGION 1..359: note = Variant of oxalate decarboxylase from Gemmata sp. SH-PL17
MGDPTFMNNVPDHLLADKDLPTFKFELEKSEGKVIGKSSGKEATVVQLPISKGIAGVSMVLEPGAMRELHWHATAAEWGFVLTGHVRTTVIDPQGAAETNDFGPGDVWYFPRGHGHMLECLGDKPAHFILIFDNGYFSEFGTFSITDWIGHTPKALLAKNFGLPESAFDGFPKKEVYFARGAVPPATPAAPLQGLKLPPLTHKYELLEQEPHKVFKGGREWRVDSTRFPISKTVTGVVLDLEPGALRELHWHPNADEWQYVIDGNISVTMFGSHGRVRTEQMEKGDVGYIPQGYGHSIENVGDRPCRVLIGFNTGNYQAIDLSQWIAGNPADVLATNFSKPTSLFEKFPKQDVFIAPGK

SEQ ID NO: 1583 - DNA, 1077 bp, synthetic construct
  misc_feature 1..1077: note = Variant of oxalate decarboxylase from Gemmata sp. SH-PL17
  source 1..1077: mol_type = other DNA
atgggtgatccgacctttatgaataatgtgccagaccatctgctgtcggataaagatttgccgacgttcaagtttgccctggaaaagagcaagggcaaagtcattgggaaaagttcgggaaaagaagcaaccgttgttcagttacctatctccaaaggcattgctggtgtgagcatgacccttgaaccgggtgcgatgcgcgaattgcactggcatgccacagcagcagagtgggggttcgtattaaccggccacgtccgtacgacggtgatcgatccacaaggtctggccgaaaccaacgactttggaccgggcgacgtgtggtattttcctcgcggtcatgggcacatgctggaatgcctgggcgataaaccggcgcatttcattctgatcttcgataacggctacttctcagagtttggcaccttctctattactgactggatcggtcacacaccgaaagcgcttctcgccaagaactttgggctgcccgaatcggcttttgatgggtttcccaaaaaggaggtctattttgcacgtggcgcggttccaccagccacccctgcagcgcctttacagggactgaaattgccaccactcacgcataaatacgaactcctcgaacagccgcctcataaagtattcaaaggtggtcgtgaatggcgcgtggatagcacccgttttcccatttccaagactgtaaccggcgttgttcttgatttggaacccggcgcgttacgcgagcttcactggcatcctaatgctgacgagtggcaatatgtgatcgatggcaacattagtgtgacgatgttcggttctcatggccgtgtacgcaccgaacagatggagaaaggtgatgtcgggtatattccacaggggtatggccacagcatcgaaaatgtgggagatcgtccttgtcgcgtcttgattggctttaacacaggtaactacgaggccatcgacttatcacaatggattgcaggtaatcccgcggatgttcttgccacgaacttctccaaacccaccagcctctttgaaaagttcccaaaacaggacgtgtttattgctcctggcaag

SEQ ID NO: 1584 - protein, 359 aa, synthetic construct
  REGION 1..359: note = Variant of oxalate decarboxylase from Gemmata sp. SH-PL17
MGDPTFMNNVPDHLLSDKDLPTFKFALEKSKGKVIGKSSGKEATVVQLPISKGIAGVSMTLEPGAMRELHWHATAAEWGFVLTGHVRTTVIDPQGLAETNDFGPGDVWYFPRGHGHMLECLGDKPAHFILIFDNGYFSEFGTFSITDWIGHTPKALLAKNFGLPESAFDGFPKKEVYFARGAVPPATPAAPLQGLKLPPLTHKYELLEQPPHKVFKGGREWRVDSTRFPISKTVTGVVLDLEPGALRELHWHPNADEWQYVIDGNISVTMFGSHGRVRTEQMEKGDVGYIPQGYGHSIENVGDRPCRVLIGFNTGNYEAIDLSQWIAGNPADVLATNFSKPTSLFEKFPKQDVFIAPGK

SEQ ID NO: 1585 - DNA, 1077 bp, synthetic construct
  misc_feature 1..1077: note = Variant of oxalate decarboxylase from Gemmata sp. SH-PL17
  source 1..1077: mol_type = other DNA
atgggtgaccctacctttatgaacaatgtaccagaccatctgctggcgggcaaagatttgccgacgttcaagtttgcactggaaaagagcaagggcaaagtcattgggaaaagttcgggaaaagaagcaaccgttgtccagttacctatctccaaaggcattgctggtgtgagcatggtacttgaaccgggtgcgatgcgcgaattgcactggcatgccacagcagcagagtggggcttcgtattaactggccacgtccgtacgacggtgatcgatccacaaggtctggccgaaaccaacgactttggaccgggcgacgtgtggtattttcctcgcggtcatgggcacatgctggaatgcctgggcgataaaccggcgcatttcattctgatcttcgataacggctacttctcagagtttggcaccttctctattactgactggatcggtcacacaccgaaagcgcttctcgccaagaactttggcctgcccgaaagcgcttttgatgggtttcccaaagatgaggtctattttgcacgtggcgcggttccaccagccacccctgcagcgcctttacagggacgcaagctgccaccactcacgcataaatacgaactcctcgaacaagagcctcataaagtttttaaaggtggtcgtgaatggcgcgtggatagcactcgttttcccatttccaagactgtaaccggcgttgttcttgatttggaacccggcgcgttacgcgagcttcactggcatcctaatgctgacgagtggcaatatgtgatcgatggcaacattagtgtgacgatgttcggttctcatggccgtgtccgcaccgaacagatggagaagggtgatgtcgggtatattccacaggggtatggccacagcatcgaaaatgttggagatcgtccttgtcgcgtcttgattggctttaacacaggtaactacgaggcgatcgacttatcacagtggattgcaggtaatcccgcggatgttcttgccacgaacttctccaaacccaccagcctctttgaaaagttcccaaaacaggacgtgtttattgctcctggcaag

SEQ ID NO: 1586 - protein, 359 aa, synthetic construct
  REGION 1..359: note = Variant of oxalate decarboxylase from Gemmata sp. SH-PL17
MGDPTFMNNVPDHLLAGKDLPTFKFALEKSKGKVIGKSSGKEATVVQLPISKGIAGVSMVLEPGAMRELHWHATAAEWGFVLTGHVRTTVIDPQGLAETNDFGPGDVWYFPRGHGHMLECLGDKPAHFILIFDNGYFSEFGTFSITDWIGHTPKALLAKNFGLPESAFDGFPKDEVYFARGAVPPATPAAPLQGRKLPPLTHKYELLEQEPHKVFKGGREWRVDSTRFPISKTVTGVVLDLEPGALRELHWHPNADEWQYVIDGNISVTMFGSHGRVRTEQMEKGDVGYIPQGYGHSIENVGDRPCRVLIGFNTGNYEAIDLSQWIAGNPADVLATNFSKPTSLFEKFPKQDVFIAPGK

SEQ ID NO: 1587 - DNA, 1077 bp, synthetic construct
  misc_feature 1..1077: note = Variant of oxalate decarboxylase from Gemmata sp. SH-PL17
  source 1..1077: mol_type = other DNA
atgggtgaccctacctttatgaacaatgtaccagaccatctgctggcgggcaaagatttgccgacgttcaagtttgcactggaaaagagcgagggcaaagtcattgggggcagttcgggaaaagaagcaaccgttgtccagttacctatctccaaaggcattgctggtgtgagcatggtacttgaaccgggtgcgatgcgcgaattgcactggcatgccacagcagcagagtggggcttcgtattaactggccacgtccgtacgacggtgatcgatccacaaggtgcagccgaaaccaacgactttggaccgggcgacgtgtggtattttcctcgcggtcatgggcacatgctggaatgcctgggcgataaaccggcgcatttcattctgatcttcgataacggctacttctcagagtttggcaccttctctattactgactggatcggtcacacaccgaaagcgcttctcgccaagaactttggcctgcccgaaagcgcttttgatgggtttcccaaagatgaggtctattttgcacgtggcgcggttccaccagccacccctgcagcgcctttacagggactgaagctgccaccactcacgcataaatacgaactcctcgaacaagaacctcataaagtttttaaaggtggtcgtgaatggcgcgtggatagcactcgttttcccatttccaagactgtaaccggcgttgttcttgatttggaacccggcgcgttacgcgagcttcactggcatcctaatgctgacgagtggcaatatgtgatcgatggcaacattagtgtgacgatgttcggttctcatggccgtgtccgcaccgaacagatggagaagggtgatgtcgggtatattccacaggggtatggccacagcatcgaaaatgttggagatcgtccttgtcgcgtcttgattggctttaacacaggtaactacgaggcgatcgacttatcacagtggattgcaggtaatcccgcggatgttcttgccacgaacttctccaaacccaccagcctctttgaaaagttcccaaaacaggacgtgtttattgctcctggcaag

SEQ ID NO: 1588 - protein, 359 aa, synthetic construct
  REGION 1..359: note = Variant of oxalate decarboxylase from Gemmata sp. SH-PL17
MGDPTFMNNVPDHLLAGKDLPTFKFALEKSEGKVIGGSSGKEATVVQLPISKGIAGVSMVLEPGAMRELHWHATAAEWGFVLTGHVRTTVIDPQGAAETNDFGPGDVWYFPRGHGHMLECLGDKPAHFILIFDNGYFSEFGTFSITDWIGHTPKALLAKNFGLPESAFDGFPKDEVYFARGAVPPATPAAPLQGLKLPPLTHKYELLEQEPHKVFKGGREWRVDSTRFPISKTVTGVVLDLEPGALRELHWHPNADEWQYVIDGNISVTMFGSHGRVRTEQMEKGDVGYIPQGYGHSIENVGDRPCRVLIGFNTGNYEAIDLSQWIAGNPADVLATNFSKPTSLFEKFPKQDVFIAPGK

SEQ ID NO: 1589 - DNA, 1077 bp, synthetic construct
  misc_feature 1..1077: note = Variant of oxalate decarboxylase from Gemmata sp. SH-PL17
  source 1..1077: mol_type = other DNA
atgggtgatccgacctttatgaataatgtgccagaccatctgctggcggataaagatttgccgacgttcaagtttgaactggaaaagagcgagggcaaagtcattgggggcagttcgggaaaagaagcaaccgttgttcagttacctatctccaaaggcattgctggtgtgagcatgacccttgaaccgggtgcgatgcgcgaattgcactggcatgccacagcagcagagtgggggttcgtattaaccggccacgtccgtacgacggtgatcgatccacaaggtgcggccgaaaccaacgactttggaccgggcgacgtgtggtattttcctcgcggtcatgggcacatgctggaatgcctgggcgataaaccggcgcatttcattctgatcttcgataacggctacttctcagagtttggcaccttctctattactgactggatcggtcacacaccgaaagcgcttctcgccaagaactttgggctgcccgaatcggcttttgatgggtttcccaaagatgaggtctattttgcacgtggcgcggttccaccagccacccctgcagcgcctttacagggacgcaaattgccaccactcacgcataaatacgaactcctcgaacaggaacctcataaagtattcaaaggtggtcgtgaatggcgcgtggatagcacccgttttcccatttccaagactgtaaccggcgttgttcttgatttggaacccggcgcgttacgcgagcttcactggcatcctaatgctgacgagtggcaatatgtgatcgatggcaacattagtgtgacgatgttcggttctcatggccgtgtacgcaccgaacagatggagaaaggtgatgtcgggtatattccacaggggtatggccacagcatcgaaaatgtgggagatcgtccttgtcgcgtcttgattggctttaacacaggtaactacgaggccatcgacttatcacaatggattgcaggtaatcccgcggatgttcttgccacgaacttctccaaacccaccagcctctttgaaaagttcccaaaacaggacgtgtttattgctcctggcaag

SEQ ID NO: 1590 - protein, 359 aa, synthetic construct
  REGION 1..359: note = Variant of oxalate decarboxylase from Gemmata sp. SH-PL17
MGDPTFMNNVPDHLLADKDLPTFKFELEKSEGKVIGGSSGKEATVVQLPISKGIAGVSMTLEPGAMRELHWHATAAEWGFVLTGHVRTTVIDPQGAAETNDFGPGDVWYFPRGHGHMLECLGDKPAHFILIFDNGYFSEFGTFSITDWIGHTPKALLAKNFGLPESAFDGFPKDEVYFARGAVPPATPAAPLQGRKLPPLTHKYELLEQEPHKVFKGGREWRVDSTRFPISKTVTGVVLDLEPGALRELHWHPNADEWQYVIDGNISVTMFGSHGRVRTEQMEKGDVGYIPQGYGHSIENVGDRPCRVLIGFNTGNYEAIDLSQWIAGNPADVLATNFSKPTSLFEKFPKQDVFIAPGK

SEQ ID NO: 1591 - DNA, 1077 bp, synthetic construct
  misc_feature 1..1077: note = Variant of oxalate decarboxylase from Gemmata sp. SH-PL17
  source 1..1077: mol_type = other DNA
atgggtgatccgacctttatgaataatgtgccagaccatctgctggcgggtaaagatttgccgacgttcaagtttgcactggaaaagagcaagggcaaagtcattgggaaaagttcgggaaaagaagcaaccgttgttcagttacctatctccaaaggcattgctggtgtgagcatgactcttgaaccgggtgcgatgcgcgaattgcactggcatgccacagcagcagagtgggggttcgtattaaccggccacgtccgtacgacggtgatcgatccacaaggtctggccgaaaccaacgactttggaccgggcgacgtgtggtattttcctcgcggtcatgggcacatgctggaatgcctgggcgataaaccggcgcatttcattctgatcttcgataacggctacttctcagagtttggcaccttctctattactgactggatcggtcacacaccgaaagcgcttctcgccaagaactttggtctgcccgaatcggcttttgatgggtttcccaaagacgaggtctattttgcacgtggcgcggttccaccagccacccctgcagcgcctttacagggacgcaaattgccaccactcacgcataaatacgaactcctcgaacagccgcctcataaagtattcaaaggtggtcgtgaatggcgcgtggatagcacccgttttcccatttccaagactgtaaccggcgttgttcttgatttggaacccggcgcgttacgcgagcttcactggcatcctaatgctgacgagtggcaatatgtgatcgatggcaacattagtgtgacgatgttcggttctcatggccgtgtacgcaccgaacagatggagaaaggtgatgtcgggtatattccacaggggtatggccacagcatcgaaaatgtgggagatcgtccttgtcgcgtcttgattggctttaacacaggtaactacgaagccatcgacttatcacaatggattgcaggtaatcccgcggatgttcttgccacgaacttctccaaacccaccagcctctttgaaaagttcccaaaacaggacgtgtttattgctcctggcaag

SEQ ID NO: 1592 - protein, 359 aa, synthetic construct
  REGION 1..359: note = Variant of oxalate decarboxylase from Gemmata sp. SH-PL17
MGDPTFMNNVPDHLLAGKDLPTFKFALEKSKGKVIGKSSGKEATVVQLPISKGIAGVSMTLEPGAMRELHWHATAAEWGFVLTGHVRTTVIDPQGLAETNDFGPGDVWYFPRGHGHMLECLGDKPAHFILIFDNGYFSEFGTFSITDWIGHTPKALLAKNFGLPESAFDGFPKDEVYFARGAVPPATPAAPLQGRKLPPLTHKYELLEQPPHKVFKGGREWRVDSTRFPISKTVTGVVLDLEPGALRELHWHPNADEWQYVIDGNISVTMFGSHGRVRTEQMEKGDVGYIPQGYGHSIENVGDRPCRVLIGFNTGNYEAIDLSQWIAGNPADVLATNFSKPTSLFEKFPKQDVFIAPGK

SEQ ID NO: 1593 - DNA, 1077 bp, synthetic construct
  misc_feature 1..1077: note = Variant of oxalate decarboxylase from Gemmata sp. SH-PL17
  source 1..1077: mol_type = other DNA
atgggtgatccgacctttatgaataatgtgccagaccatctgctggcgggtaaagatttgccgacgttcaagtttgaactggaaaagagcaagggcaaagtcattgggaaaagttcgggaaaagaagcaaccgttgttcagttacctatctccaaaggcattgctggtgtgagcatggtgcttgaaccgggtgcgatgcgcgaattgcactggcatgccacagcagcagagtgggctttcgtattaaccggccacgtccgtacgacggtgatcgatccacaaggtgcggccgaaaccaacgactttggaccgggcgacgtgtggtattttcctcgcggtcatgggcacatgctggaatgcctgggcgataaaccggcgcatttcattctgatcttcgataacggctacttctcagagtttggcaccttctctattactgactggatcggtcacacaccgaaagcgcttctcgccaagaactttgggctgcccgaatcggcttttgatgggtttcccaaagacgaggtctattttgcacgtggcgcggttccaccagccacccctgcagcgcctttacagggacgcaaattgccaccactcacgcataaatacgaactcctcgaacagccgcctcataaagtattcaaaggtggtcgtgaatggcgcgtggatagcacccgttttcccatttccaagactgtaaccggcgttgttcttgatttggaacccggcgcgttacgcgagcttcactggcatcctaatgctgacgagtggcaatatgtgatcgatggcaacattagtgtgacgatgttcggttctcatggccgttatcgcaccgaacagatggagaaaggtgatgtcgggtatattccacaggggtatggccacagcatcgaaaatgtgggagatcgtccttgtcgcgtcttgattggctttaacacaggtaactaccaggccatcgacttatcacaatggattgcaggtaatcccgcggatgttcttgccacgaacttctccaaacccaccagcctctttgaaaagttcccaaaacaggacgtgtttattgctcctggcaag

SEQ ID NO: 1594 - protein, 359 aa, synthetic construct
  REGION 1..359: note = Variant of oxalate decarboxylase from Gemmata sp. SH-PL17
MGDPTFMNNVPDHLLAGKDLPTFKFELEKSKGKVIGKSSGKEATVVQLPISKGIAGVSMVLEPGAMRELHWHATAAEWAFVLTGHVRTTVIDPQGAAETNDFGPGDVWYFPRGHGHMLECLGDKPAHFILIFDNGYFSEFGTFSITDWIGHTPKALLAKNFGLPESAFDGFPKDEVYFARGAVPPATPAAPLQGRKLPPLTHKYELLEQPPHKVFKGGREWRVDSTRFPISKTVTGVVLDLEPGALRELHWHPNADEWQYVIDGNISVTMFGSHGRYRTEQMEKGDVGYIPQGYGHSIENVGDRPCRVLIGFNTGNYQAIDLSQWIAGNPADVLATNFSKPTSLFEKFPKQDVFIAPGK

SEQ ID NO: 1595 - DNA, 1077 bp, synthetic construct
  misc_feature 1..1077: note = Variant of oxalate decarboxylase from Gemmata sp. SH-PL17
  source 1..1077: mol_type = other DNA
atgggtgatccgacctttatgaataatgtgccagaccatctgctgtcggataaagatttgccgacgttcaagtttgccctggaaaagagcgagggcaaagtcattgggaaaagttcgggaaaagaagcaaccgttgttcagttacctatctccaaaggcattgctggtgtgagcatgacccttgaaccgggtgcgatgcgcgaattgcactggcatgccacagcagcagagtgggctttcgtattaaccggccacgtccgtacgacggtgatcgatccacaaggtgcggccgaaaccaacgactttggaccgggcgacgtgtggtattttcctcgcggtcatgggcacatgctggaatgcctgggcgataaaccggcgcatttcattctgatcttcgataacggctacttctcagagtttggcaccttctctattactgactggatcggtcacacaccgaaagcgcttctcgccaagaactttgggctgcccgaatcggcttttgatgggtttcccaaagacgaggtctattttgcacgtggcgcggttccaccagccacccctgcagcgcctttacagggactgaaattgccaccactcacgcataaatacgaactcctcgaacagccgcctcataaagtattcaaaggtggtcgtgaatggcgcgtggatagcacccgttttcccatttccaagactgtaaccggcgttgttcttgatttggaacccggcgcgttacgcgagcttcactggcatcctaatgctgacgagtggcaatatgtgatcgatggcaacattagtgtgacgatgttcggttctcatggccgtgtacgcaccgaacagatggagaaaggtgatgtcgggtatattccacaggggtatggccacagcatcgaaaatgtgggagatcgtccttgtcgcgtcttgattggctttaacacaggtaactaccaggccatcgacttatcacaatggattgcaggtaatcccgcggatgttcttgccacgaacttctccaaacccaccagcctctttgaaaagttcccaaaacaggacgtgtttattgctcctggcaag

SEQ ID NO: 1596 - protein, 359 aa, synthetic construct
  REGION 1..359: note = Variant of oxalate decarboxylase from Gemmata sp. SH-PL17
MGDPTFMNNVPDHLLSDKDLPTFKFALEKSEGKVIGKSSGKEATVVQLPISKGIAGVSMTLEPGAMRELHWHATAAEWAFVLTGHVRTTVIDPQGAAETNDFGPGDVWYFPRGHGHMLECLGDKPAHFILIFDNGYFSEFGTFSITDWIGHTPKALLAKNFGLPESAFDGFPKDEVYFARGAVPPATPAAPLQGLKLPPLTHKYELLEQPPHKVFKGGREWRVDSTRFPISKTVTGVVLDLEPGALRELHWHPNADEWQYVIDGNISVTMFGSHGRVRTEQMEKGDVGYIPQGYGHSIENVGDRPCRVLIGFNTGNYQAIDLSQWIAGNPADVLATNFSKPTSLFEKFPKQDVFIAPGK

SEQ ID NO: 1597 - DNA, 1077 bp, synthetic construct
  misc_feature 1..1077: note = Variant of oxalate decarboxylase from Gemmata sp. SH-PL17
  source 1..1077: mol_type = other DNA
atgggtgatccgacctttatgaataatgtgccagaccatctgctggcggataaagatttgccgacgttcaagtttgccctggaaaagagcaagggcaaagtcattgggaaaagttcgggaaaagaagcaaccgttgttcagttacctatctccaaaggcattgctggtgtgagcatggtgcttgaaccgggtgcgatgcgcgaattgcactggcatgccacagcagcagagtgggcgttcgtattaaccggccacgtccgtacgacggtgatcgatccacaaggtgcggccgaaaccaacgactttggaccgggcgacgtgtggtattttcctcgcggtcatgggcacatgctggaatgcctgggcgataaaccggcgcatttcattctgatcttcgataacggctacttctcagagtttggcaccttctctattactgactggatcggtcacacaccgaaagcgcttctcgccaagaactttaaactgcccgaatcggcttttgatgggtttcccaaagatgaggtctattttgcacgtggcgcggttccaccagccacccctgcagcgcctttacagggacgcaaattgccaccactcacgcataaatacgaactcctcgaacaggatcctcataaagtattcaaaggtggtcgtgaatggcgcgtggatagcacccgttttcccatttccaagactgtaaccggcgttgttcttgatttggaacccggcgcgttacgcgagcttcactggcatcctaatgctgacgagtggcaatatgtgatcgatggcaacattagtgtgacgatgttcggttctcatggccgtgtacgcaccgaacagatggagaaaggtgatgtcgggtatattccacaggggtatggccacagcatcgaaaatgtgggagatcgtccttgtcgcgtcttgattggctttaacacaggtaactacgaggccatcgacttatcacaatggattgcaggtaatcccgcggatgttcttgccacgaacttctccaaacccaccagcctctttgaaaagttcccaaaacaggacgtgtttattgctcctggcaag

SEQ ID NO: 1598 - protein, 359 aa, synthetic construct
  REGION 1..359: note = Variant of oxalate decarboxylase from Gemmata sp. SH-PL17
MGDPTFMNNVPDHLLADKDLPTFKFALEKSKGKVIGKSSGKEATVVQLPISKGIAGVSMVLEPGAMRELHWHATAAEWAFVLTGHVRTTVIDPQGAAETNDFGPGDVWYFPRGHGHMLECLGDKPAHFILIFDNGYFSEFGTFSITDWIGHTPKALLAKNFKLPESAFDGFPKDEVYFARGAVPPATPAAPLQGRKLPPLTHKYELLEQDPHKVFKGGREWRVDSTRFPISKTVTGVVLDLEPGALRELHWHPNADEWQYVIDGNISVTMFGSHGRVRTEQMEKGDVGYIPQGYGHSIENVGDRPCRVLIGFNTGNYEAIDLSQWIAGNPADVLATNFSKPTSLFEKFPKQDVFIAPGK

SEQ ID NO: 1599 - DNA, 1077 bp, synthetic construct
  misc_feature 1..1077: note = Variant of oxalate decarboxylase from Gemmata sp. SH-PL17
  source 1..1077: mol_type = other DNA
atgggtgatccgacctttatgaataatgtgccagaccatctgctgtcgggtaaagatttgccgacgttcaagtttgcactggaaaagagcgagggcaaagtcattgggaaaagttcgggaaaagaagcaaccgttgttcagttacctatctccaaaggcattgctggtgtgagcatgactcttgaaccgggtgcgatgcgcgaattgcactggcatgccacagcagcagagtgggggttcgtattaaccggccacgtccgtacgacggtgatcgatccacaaggtgcggccgaaaccaacgactttggaccgggcgacgtgtggtattttcctcgcggtcatgggcacatgctggaatgcctgggcgataaaccggcgcatttcattctgatcttcgataacggctacttctcagagtttggcaccttctctattactgactggatcggtcacacaccgaaagcgcttctcgccaagaactttgggctgcccgaatcggcttttgatgggtttcccaaagatgaggtctattttgcacgtggcgcggttccaccagccacccctgcagcgcctttacagggacgcaaattgccaccactcacgcataaatacgaactcctcgaacagcctcctcataaagtattcaaaggtggtcgtgaatggcgcgtggatagcacccgttttcccatttccaagactgtaaccggcgttgttcttgatttggaacccggcgcgttacgcgagcttcactggcatcctaatgctgacgagtggcaatatgtgatcgatggcaacattagtgtgacgatgttcggttctcatggccgttatcgcaccgaacagatggagaaaggtgatgtcgggtatattccacaggggtatggccacagcatcgaaaatgtgggagatcgtccttgtcgcgtcttgattggctttaacacaggtaactacgaagccatcgacttatcacaatggattgcaggtaatcccgcggatgttcttgccacgaacttctccaaacccaccagcctctttgaaaagttcccaaaacaggacgtgtttattgctcctggcaag

SEQ ID NO: 1600 - protein, 359 aa, synthetic construct
  REGION 1..359: note = Variant of oxalate decarboxylase from Gemmata sp. SH-PL17
MGDPTFMNNVPDHLLSGKDLPTFKFALEKSEGKVIGKSSGKEATVVQLPISKGIAGVSMTLEPGAMRELHWHATAAEWGFVLTGHVRTTVIDPQGAAETNDFGPGDVWYFPRGHGHMLECLGDKPAHFILIFDNGYFSEFGTFSITDWIGHTPKALLAKNFGLPESAFDGFPKDEVYFARGAVPPATPAAPLQGRKLPPLTHKYELLEQPPHKVFKGGREWRVDSTRFPISKTVTGVVLDLEPGALRELHWHPNADEWQYVIDGNISVTMFGSHGRYRTEQMEKGDVGYIPQGYGHSIENVGDRPCRVLIGFNTGNYEAIDLSQWIAGNPADVLATNFSKPTSLFEKFPKQDVFIAPGK

SEQ ID NO: 1601 - DNA, 1077 bp, synthetic construct
  misc_feature 1..1077: note = Variant of oxalate decarboxylase from Gemmata sp. SH-PL17
  source 1..1077: mol_type = other DNA
atgggtgatccgacctttatgaataatgtgccagaccatctgctggcggataaagatttgccgacgttcaagtttgaactggaaaagagcgagggcaaagtcattgggaaaagttcgggaaaagaagcaaccgttgttcagttacctatctccaaaggcattgctggtgtgagcatgacccttgaaccgggtgcgatgcgcgaattgcactggcatgccacagcagcagagtgggctttcgtattaaccggccacgtccgtacgacggtgatcgatccacaaggtgcggccgaaaccaacgactttggaccgggcgacgtgtggtattttcctcgcggtcatgggcacatgctggaatgcctgggcgataaaccggcgcatttcattctgatcttcgataacggctacttctcagagtttggcaccttctctattactgactggatcggtcacacaccgaaagcgcttctcgccaagaactttgggctgcccgaatcggcttttgatgggtttcccaaagacgaggtctattttgcacgtggcgcggttccaccagccacccctgcagcgcctttacagggacgcaaattgccaccactcacgcataaatacgaactcctcgaacagccgcctcataaagtattcaaaggtggtcgtgaatggcgcgtggatagcacccgttttcccatttccaagactgtaaccggcgttgttcttgatttggaacccggcgcgttacgcgagcttcactggcatcctaatgctgacgagtggcaatatgtgatcgatggcaacattagtgtgacgatgttcggttctcatggccgtgtacgcaccgaacagatggagaaaggtgatgtcgggtatattccacaggggtatggccacagcatcgaaaatgtgggagatcgtccttgtcgcgtcttgattggctttaacacaggtaactacgaggccatcgacttatcacaatggattgcaggtaatcccgcggatgttcttgccacgaacttctccaaacccaccagcctctttgaaaagttcccaaaacaggacgtgtttattgctcctggcaag

SEQ ID NO: 1602 - protein, 359 aa, synthetic construct
  REGION 1..359: note = Variant of oxalate decarboxylase from Gemmata sp. SH-PL17
MGDPTFMNNVPDHLLADKDLPTFKFELEKSEGKVIGKSSGKEATVVQLPISKGIAGVSMTLEPGAMRELHWHATAAEWAFVLTGHVRTTVIDPQGAAETNDFGPGDVWYFPRGHGHMLECLGDKPAHFILIFDNGYFSEFGTFSITDWIGHTPKALLAKNFGLPESAFDGFPKDEVYFARGAVPPATPAAPLQGRKLPPLTHKYELLEQPPHKVFKGGREWRVDSTRFPISKTVTGVVLDLEPGALRELHWHPNADEWQYVIDGNISVTMFGSHGRVRTEQMEKGDVGYIPQGYGHSIENVGDRPCRVLIGFNTGNYEAIDLSQWIAGNPADVLATNFSKPTSLFEKFPKQDVFIAPGK

SEQ ID NO: 1603 - DNA, 1077 bp, synthetic construct
  misc_feature 1..1077: note = Variant of oxalate decarboxylase from Gemmata sp. SH-PL17
  source 1..1077: mol_type = other DNA
atgggtgatccgacctttatgaataatgtgccagaccatctgctggcggataaagatttgccgacgttcaagtttgaactggaaaagagcgagggcaaagtcattgggggcagttcgggaaaagaagcaaccgttgttcagttacctatctccaaaggcattgctggtgtgagcatgacccttgaaccgggtgcgatgcgcgaattgcactggcatgccacagcagcagagtgggcgttcgtattaaccggccacgtccgtacgacggtgatcgatccacaaggtgcggccgaaaccaacgactttggaccgggcgacgtgtggtattttcctcgcggtcatgggcacatgctggaatgcctgggcgataaaccggcgcatttcattctgatcttcgataacggctacttctcagagtttggcaccttctctattactgactggatcggtcacacaccgaaagcgcttctcgccaagaactttgggctgcccgaatcggcttttgatgggtttcccaaagatgaggtctattttgcacgtggcgcggttccaccagccacccctgcagcgcctttacagggacgcaaattgccaccactcacgcataaatacgaactcctcgaacagccgcctcataaagtattcaaaggtggtcgtgaatggcgcgtggatagcacccgttttcccatttccaagactgtaaccggcgttgttcttgatttggaacccggcgcgttacgcgagcttcactggcatcctaatgctgacgagtggcaatatgtgatcgatggcaacattagtgtgacgatgttcggttctcatggccgttatcgcaccgaacagatggagaaaggtgatgtcgggtatattccacaggggtatggccacagcatcgaaaatgtgggagatcgtccttgtcgcgtcttgattggctttaacacaggtaactacgaagccatcgacttatcacaatggattgcaggtaatcccgcggatgttcttgccacgaacttctccaaacccaccagcctctttgaaaagttcccaaaacaggacgtgtttattgctcctggcaag

SEQ ID NO: 1604 - protein, 359 aa, synthetic construct
  REGION 1..359: note = Variant of oxalate decarboxylase from Gemmata sp. SH-PL17
MGDPTFMNNVPDHLLADKDLPTFKFELEKSEGKVIGGSSGKEATVVQLPISKGIAGVSMTLEPGAMRELHWHATAAEWAFVLTGHVRTTVIDPQGAAETNDFGPGDVWYFPRGHGHMLECLGDKPAHFILIFDNGYFSEFGTFSITDWIGHTPKALLAKNFGLPESAFDGFPKDEVYFARGAVPPATPAAPLQGRKLPPLTHKYELLEQPPHKVFKGGREWRVDSTRFPISKTVTGVVLDLEPGALRELHWHPNADEWQYVIDGNISVTMFGSHGRYRTEQMEKGDVGYIPQGYGHSIENVGDRPCRVLIGFNTGNYEAIDLSQWIAGNPADVLATNFSKPTSLFEKFPKQDVFIAPGK

SEQ ID NO: 1605 - DNA, 1077 bp, synthetic construct
  misc_feature 1..1077: note = Variant of oxalate decarboxylase from Gemmata sp. SH-PL17
  source 1..1077: mol_type = other DNA
atgggtgatccgacctttatgaataatgtgccagaccatctgctggcggataaagatttgccgacgttcaagtttgccctggaaaagagcaagggcaaagtcattgggaaaagttcgggaaaagaagcaaccgttgttcagttacctatctccaaaggcattgctggtgtgagcatgacccttgaaccgggtgcgatgcgcgaattgcactggcatgccacagcagcagagtgggcgttcgtattatggggccacgtccgtacgacggtgatcgatccacaaggtgcggccgaaaccaacgactttggaccgggcgacgtgtggtattttcctcgcggtcatgggcacatgctggaatgcctgggcgataaaccggcgcatttcattctgatcttcgataacggctacttctcagagtttggcaccttctctattactgactggatcggtcacacaccgaaagcgcttctcgccaagaactttgggctgcccgaatcggcttttgatgggtttcccaaagatgaggtctattttgcacgtggcgcggttccaccagccacccctgcagcgcctttacagggacgcaaattgccaccactcacgcataaatacgaactcctcgaacagccgcctcataaagtattcaaaggtggtcgtgaatggcgcgtggatagcacccgttttcccatttccaagactgtaaccggcgttgttcttgatttggaacccggcgcgttacgcgagcttcactggcatcctaatgctgacgagtggcaatatgtgatcgatggcaacattagtgtgacgatgttcggttctcatggccgttatcgcaccgaacagatggagaaaggtgatgtcgggtatattccacaggggtatggccacagcatcgaaaatgtgggagatcgtccttgtcgcgtcttgattggctttaacacaggtaactacgaggccatcgacttatcacaatggattgcaggtaatcccgcggatgttcttgccacgaacttctccaaacccaccagcctctttgaaaagttcccaaaacaggacgtgtttattgctcctggcaag

SEQ ID NO: 1606 - protein, 359 aa, synthetic construct
  REGION 1..359: note = Variant of oxalate decarboxylase from Gemmata sp. SH-PL17
MGDPTFMNNVPDHLLADKDLPTFKFALEKSKGKVIGKSSGKEATVVQLPISKGIAGVSMTLEPGAMRELHWHATAAEWAFVLWGHVRTTVIDPQGAAETNDFGPGDVWYFPRGHGHMLECLGDKPAHFILIFDNGYFSEFGTFSITDWIGHTPKALLAKNFGLPESAFDGFPKDEVYFARGAVPPATPAAPLQGRKLPPLTHKYELLEQPPHKVFKGGREWRVDSTRFPISKTVTGVVLDLEPGALRELHWHPNADEWQYVIDGNISVTMFGSHGRYRTEQMEKGDVGYIPQGYGHSIENVGDRPCRVLIGFNTGNYEAIDLSQWIAGNPADVLATNFSKPTSLFEKFPKQDVFIAPGK

SEQ ID NO: 1607 - DNA, 1077 bp, synthetic construct
  misc_feature 1..1077: note = Variant of oxalate decarboxylase from Gemmata sp. SH-PL17
  source 1..1077: mol_type = other DNA
atgggtgatccgacctttatgaataatgtgccagaccatctgctgtcgggtaaagatttgccgacgttcaagtttgccctggaaaagagcgagggcaaagtcattgggaaaagttcgggaaaagaagcaaccgttgttcagttacctatctccaaaggcattgctggtgtgagcatgactcttgaaccgggtgcgatgcgcgaattgcactggcatgccacagcagcagagtgggctttcgtattaaccggccacgtccgtacgacggtgatcgatccacaaggtgcggccgaaaccaacgactttggaccgggcgacgtgtggtattttcctcgcggtcatgggcacatgctggaatgcctgggcgataaaccggcgcatttcattctgatcttcgataacggctacttctcagagtttggcaccttctctattactgactggatcggtcacacaccgaaagcgcttctcgccaagaactttggtctgcccgaatcggcttttgatgggtttcccaaagacgaggtctattttgcacgtggcgcggttccaccagccacccctgcagcgcctttacagggacgcaaattgccaccactcacgcataaatacgaactcctcgaacagcctcctcataaagtattcaaaggtggtcgtgaatggcgcgtggatagcacccgttttcccatttccaagactgtaaccggcgttgttcttgatttggaacccggcgcgttacgcgagcttcactggcatcctaatgctgacgagtggcaatatgtgatcgatggcaacattagtgtgacgatgttcggttctcatggccgttaccgcaccgaacagatggagaaaggtgatgtcgggtatattccacaggggtatggccacagcatcgaaaatgtgggagatcgtccttgtcgcgtcttgattggctttaacacaggtaactacgaagccatcgacttatcacaatggattgcaggtaatcccgcggatgttcttgccacgaacttctccaaacccaccagcctctttgaaaagttcccaaaacaggacgtgtttattgctcctggcaag

SEQ ID NO: 1608 - protein, 359 aa, synthetic construct
  REGION 1..359: note = Variant of oxalate decarboxylase from Gemmata sp. SH-PL17
MGDPTFMNNVPDHLLSGKDLPTFKFALEKSEGKVIGKSSGKEATVVQLPISKGIAGVSMTLEPGAMRELHWHATAAEWAFVLTGHVRTTVIDPQGAAETNDFGPGDVWYFPRGHGHMLECLGDKPAHFILIFDNGYFSEFGTFSITDWIGHTPKALLAKNFGLPESAFDGFPKDEVYFARGAVPPATPAAPLQGRKLPPLTHKYELLEQPPHKVFKGGREWRVDSTRFPISKTVTGVVLDLEPGALRELHWHPNADEWQYVIDGNISVTMFGSHGRYRTEQMEKGDVGYIPQGYGHSIENVGDRPCRVLIGFNTGNYEAIDLSQWIAGNPADVLATNFSKPTSLFEKFPKQDVFIAPGK

SEQ ID NO: 1609 - DNA, 1077 bp, synthetic construct
  misc_feature 1..1077: note = Variant of oxalate decarboxylase from Gemmata sp. SH-PL17
  source 1..1077: mol_type = other DNA
atgggtgatccgacctttatgaataatgtgccagaccatctgctggcggataaagatttgccgacgttcaagtttgccctggaaaagagcgagggcaaagtcattgggaaaagttcgggaaaagaagcaaccgttgttcagttacctatctccaaaggcattgctggtgtgagcatgactcttgaaccgggtgcgatgcgcgaattgcactggcatgccacagcagcagagtgggggttcgtattatggggccacgtccgtacgacggtgatcgatccacaaggtgcggccgaaaccaacgactttggaccgggcgacgtgtggtattttcctcgcggtcatgggcacatgctggaatgcctgggcgataaaccggcgcatttcattctgatcttcgataacggctacttctcagagtttggcaccttctctattactgactggatcggtcacacaccgaaagcgcttctcgccaagaactttgggctgcccgaatcggcttttgatgggtttcccaaagatgaggtctattttgcacgtggcgcggttccaccagccacccctgcagcgcctttacagggacgcaaattgccaccactcacgcataaatacgaactcctcgaacagccgcctcataaagtattcaaaggtggtcgtgaatggcgcgtggatagcacccgttttcccatttccaagactgtaaccggcgttgttcttgatttggaacccggcgcgttacgcgagcttcactggcatcctaatgctgacgagtggcaatatgtgatcgatggcaacattagtgtgacgatgttcggttctcatggccgttatcgcaccgaacagatggagaaaggtgatgtcgggtatattccacaggggtatggccacagcatcgaaaatgtgggagatcgtccttgtcgcgtcttgattggctttaacacaggtaactacgaagccatcgacttatcacaatggattgcaggtaatcccgcggatgttcttgccacgaacttctccaaacccaccagcctctttgaaaagttcccaaaacaggacgtgtttattgctcctggcaag

SEQ ID NO: 1610 - protein, 359 aa, synthetic construct
  REGION 1..359: note = Variant of oxalate decarboxylase from Gemmata sp. SH-PL17
MGDPTFMNNVPDHLLADKDLPTFKFALEKSEGKVIGKSSGKEATVVQLPISKGIAGVSMTLEPGAMRELHWHATAAEWGFVLWGHVRTTVIDPQGAAETNDFGPGDVWYFPRGHGHMLECLGDKPAHFILIFDNGYFSEFGTFSITDWIGHTPKALLAKNFGLPESAFDGFPKDEVYFARGAVPPATPAAPLQGRKLPPLTHKYELLEQPPHKVFKGGREWRVDSTRFPISKTVTGVVLDLEPGALRELHWHPNADEWQYVIDGNISVTMFGSHGRYRTEQMEKGDVGYIPQGYGHSIENVGDRPCRVLIGFNTGNYEAIDLSQWIAGNPADVLATNFSKPTSLFEKFPKQDVFIAPGK

SEQ ID NO: 1611 - DNA, 1077 bp, synthetic construct
  misc_feature 1..1077: note = Variant of oxalate decarboxylase from Gemmata sp. SH-PL17
  source 1..1077: mol_type = other DNA
atgggtgatccgacctttatgaataatgtgccagaccatctgctggcggataaagatttgccgacgttcaagtttgccctggaaaagagcgagggcaaagtcattgggaaaagttcgggaaaagaagcaaccgttgttcagttacctatctccaaaggcattgctggtgtgagcatggtgcttgaaccgggtgcgatgcgcgaattgcactggcatgccacagcagcagagtgggctttcgtattaaccggccacgtccgtacgacggtgatcgatccacaaggtgcggccgaaaccaacgactttggaccgggcgacgtgtggtattttcctcgcggtcatgggcacatgctggaatgcctgggcgataaaccggcgcatttcattctgatcttcgataacggctacttctcagagtttggcaccttctctattactgactggatcggtcacacaccgaaagcgcttctcgccaagaactttgggctgcccgaatcggcttttgatgggtttcccaaagacgaggtctattttgcacgtggcgcggttccaccagccacccctgcagcgcctttacagggacgcaaattgccaccactcacgcataaatacgaactcctcgaacagcctcctcataaagtattcaaaggtggtcgtgaatggcgcgtggatagcacccgttttcccatttccaagactgtaaccggcgttgttcttgatttggaacccggcgcgttacgcgagcttcactggcatcctaatgctgacgagtggcaatatgtgatcgatggcaacattagtgtgacgatgttcggttctcatggccgtgtacgcaccgaacagatggagaaaggtgatgtcgggtatattccacaggggtatggccacagcatcgaaaatgtgggagatcgtccttgtcgcgtcttgattggctttaacacaggtaactacgaagccatcgacttatcacaatggattgcaggtaatcccgcggatgttcttgccacgaacttctccaaacccaccagcctctttgaaaagttcccaaaacaggacgtgtttattgctcctggcaag

SEQ ID NO: 1612 - protein, 359 aa, synthetic construct
  REGION 1..359: note = Variant of oxalate decarboxylase from Gemmata sp. SH-PL17
MGDPTFMNNVPDHLLADKDLPTFKFALEKSEGKVIGKSSGKEATVVQLPISKGIAGVSMVLEPGAMRELHWHATAAEWAFVLTGHVRTTVIDPQGAAETNDFGPGDVWYFPRGHGHMLECLGDKPAHFILIFDNGYFSEFGTFSITDWIGHTPKALLAKNFGLPESAFDGFPKDEVYFARGAVPPATPAAPLQGRKLPPLTHKYELLEQPPHKVFKGGREWRVDSTRFPISKTVTGVVLDLEPGALRELHWHPNADEWQYVIDGNISVTMFGSHGRVRTEQMEKGDVGYIPQGYGHSIENVGDRPCRVLIGFNTGNYEAIDLSQWIAGNPADVLATNFSKPTSLFEKFPKQDVFIAPGK

SEQ ID NO: 1613 - DNA, 1077 bp, synthetic construct
  misc_feature 1..1077: note = Variant of oxalate decarboxylase from Gemmata sp. SH-PL17
  source 1..1077: mol_type = other DNA
atgggtgatccgacctttatgaataatgtgccagaccatctgctggcggataaagatttgccgacgttcaagtttgcactggaaaagagcgagggcaaagtcattgggaaaagttcgggaaaagaagcaaccgttgttcagttacctatctccaaaggcattgctggtgtgagcatgactcttgaaccgggtgcgatgcgcgaattgcactggcatgccacagcagcagagtgggcgttcgtattatggggccacgtccgtacgacggtgatcgatccacaaggtgcggccgaaaccaacgactttggaccgggcgacgtgtggtattttcctcgcggtcatgggcacatgctggaatgcctgggcgataaaccggcgcatttcattctgatcttcgataacggctacttctcagagtttggcaccttctctattactgactggatcggtcacacaccgaaagcgcttctcgccaagaactttgggctgcccgaatcggcttttgatgggtttcccaaagacgaggtctattttgcacgtggcgcggttccaccagccacccctgcagcgcctttacagggactgaaattgccaccactcacgcataaatacgaactcctcgaacagccgcctcataaagtattcaaaggtggtcgtgaatggcgcgtggatagcacccgttttcccatttccaagactgtaaccggcgttgttcttgatttggaacccggcgcgttacgcgagcttcactggcatcctaatgctgacgagtggcaatatgtgatcgatggcaacattagtgtgacgatgttcggttctcatggccgttatcgcaccgaacagatggagaaaggtgatgtcgggtatattccacaggggtatggccacagcatcgaaaatgtgggagatcgtccttgtcgcgtcttgattggctttaacacaggtaactacgaggccatcgacttatcacaatggattgcaggtaatcccgcggatgttcttgccacgaacttctccaaacccaccagcctctttgaaaagttcccaaaacaggacgtgtttattgctcctggcaag

SEQ ID NO: 1614 - protein, 359 aa, synthetic construct
  REGION 1..359: note = Variant of oxalate decarboxylase from Gemmata sp. SH-PL17
MGDPTFMNNVPDHLLADKDLPTFKFALEKSEGKVIGKSSGKEATVVQLPISKGIAGVSMTLEPGAMRELHWHATAAEWAFVLWGHVRTTVIDPQGAAETNDFGPGDVWYFPRGHGHMLECLGDKPAHFILIFDNGYFSEFGTFSITDWIGHTPKALLAKNFGLPESAFDGFPKDEVYFARGAVPPATPAAPLQGLKLPPLTHKYELLEQPPHKVFKGGREWRVDSTRFPISKTVTGVVLDLEPGALRELHWHPNADEWQYVIDGNISVTMFGSHGRYRTEQMEKGDVGYIPQGYGHSIENVGDRPCRVLIGFNTGNYEAIDLSQWIAGNPADVLATNFSKPTSLFEKFPKQDVFIAPGK

SEQ ID NO: 1615 - DNA, 1077 bp, synthetic construct
  misc_feature 1..1077: note = Variant of oxalate decarboxylase from Gemmata sp. SH-PL17
  source 1..1077: mol_type = other DNA
atgggtgatccgacctttatgaataatgtgccagaccatctgctgtcggataaagatttgccgacgttcaagtttgccctggaaaagagcgagggcaaagtcattgggaaaagttcgggaaaagaagcaaccgttgttcagttacctatctccaaaggcattgctggtgtgagcatgacccttgaaccgggtgcgatgcgcgaattgcactggcatgccacagcagcagagtgggctttcgtattaaccggccacgtccgtacgacggtgatcgatccacaaggtgcggccgaaaccaacgactttggaccgggcgacgtgtggtattttcctcgcggtcatgggcacatgctggaatgcctgggcgataaaccggcgcatttcattctgatcttcgataacggctacttctcagagtttggcaccttctctattactgactggatcggtcacacaccgaaagcgcttctcgccaagaactttggtctgcccgaatcggcttttgatgggtttcccaaagacgaggtctattttgcacgtggcgcggttccaccagccacccctgcagcgcctttacagggacgcaaattgccaccactcacgcataaatacgaactcctcgaacagccgcctcataaagtattcaaaggtggtcgtgaatggcgcgtggatagcacccgttttcccatttccaagactgtaaccggcgttgttcttgatttggaacccggcgcgttacgcgagcttcactggcatcctaatgctgacgagtggcaatatgtgatcgatggcaacattagtgtgacgatgttcggttctcatggccgttatcgcaccgaacagatggagaaaggtgatgtcgggtatattccacaggggtatggccacagcatcgaaaatgtgggagatcgtccttgtcgcgtcttgattggctttaacacaggtaactacgaagccatcgacttatcacaatggattgcaggtaatcccgcggatgttcttgccacgaacttctccaaacccaccagcctctttgaaaagttcccaaaacaggacgtgtttattgctcctggcaag

SEQ ID NO: 1616 - protein, 359 aa, synthetic construct
  REGION 1..359: note = Variant of oxalate decarboxylase from Gemmata sp. SH-PL17
MGDPTFMNNVPDHLLSDKDLPTFKFALEKSEGKVIGKSSGKEATVVQLPISKGIAGVSMTLEPGAMRELHWHATAAEWAFVLTGHVRTTVIDPQGAAETNDFGPGDVWYFPRGHGHMLECLGDKPAHFILIFDNGYFSEFGTFSITDWIGHTPKALLAKNFGLPESAFDGFPKDEVYFARGAVPPATPAAPLQGRKLPPLTHKYELLEQPPHKVFKGGREWRVDSTRFPISKTVTGVVLDLEPGALRELHWHPNADEWQYVIDGNISVTMFGSHGRYRTEQMEKGDVGYIPQGYGHSIENVGDRPCRVLIGFNTGNYEAIDLSQWIAGNPADVLATNFSKPTSLFEKFPKQDVFIAPGK

SEQ ID NO: 1617 - DNA, 1077 bp, synthetic construct
  misc_feature 1..1077: note = Variant of oxalate decarboxylase from Gemmata sp. SH-PL17
  source 1..1077: mol_type = other DNA
atgggtgatccgacctttatgaataatgtgccagaccatctgctggcgggtaaagatttgccgacgttcaagtttgccctggaaaagagcgagggcaaagtcattgggaaaagttcgggaaaagaagcaaccgttgttcagttacctatctccaaaggcattgctggtgtgagcatgacccttgaaccgggtgcgatgcgcgaattgcactggcatgccacagcagcagagtgggcgttcgtattaaccggccacgtccgtacgacggtgatcgatccacaaggtgcggccgaaaccaacgactttggaccgggcgacgtgtggtattttcctcgcggtcatgggcacatgctggaatgcctgggcgataaaccggcgcatttcattctgatcttcgataacggctacttctcagagtttggcaccttctctattactgactggatcggtcacacaccgaaagcgcttctcgccaagaactttggtctgcccgaatcggcttttgatgggtttcccaaagatgaggtctattttgcacgtggcgcggttccaccagccacccctgcagcgcctttacagggacgcaaattgccaccactcacgcataaatacgaactcctcgaacagccgcctcataaagtattcaaaggtggtcgtgaatggcgcgtggatagcacccgttttcccatttccaagactgtaaccggcgttgttcttgatttggaacccggcgcgttacgcgagcttcactggcatcctaatgctgacgagtggcaatatgtgatcgatggcaacattagtgtgacgatgttcggttctcatggccgttatcgcaccgaacagatggagaaaggtgatgtcgggtatattccacaggggtatggccacagcatcgaaaatgtgggagatcgtccttgtcgcgtcttgattggctttaacacaggtaactacgaggccatcgacttatcacaatggattgcaggtaatcccgcggatgttcttgccacgaacttctccaaacccaccagcctctttgaaaagttcccaaaacaggacgtgtttattgctcctggcaag

SEQ ID NO: 1618 - protein, 359 aa, synthetic construct
  REGION 1..359: note = Variant of oxalate decarboxylase from Gemmata sp. SH-PL17
MGDPTFMNNVPDHLLAGKDLPTFKFALEKSEGKVIGKSSGKEATVVQLPISKGIAGVSMTLEPGAMRELHWHATAAEWAFVLTGHVRTTVIDPQGAAETNDFGPGDVWYFPRGHGHMLECLGDKPAHFILIFDNGYFSEFGTFSITDWIGHTPKALLAKNFGLPESAFDGFPKDEVYFARGAVPPATPAAPLQGRKLPPLTHKYELLEQPPHKVFKGGREWRVDSTRFPISKTVTGVVLDLEPGALRELHWHPNADEWQYVIDGNISVTMFGSHGRYRTEQMEKGDVGYIPQGYGHSIENVGDRPCRVLIGFNTGNYEAIDLSQWIAGNPADVLATNFSKPTSLFEKFPKQDVFIAPGK

SEQ ID NO: 1619 - DNA, 1077 bp, synthetic construct
  misc_feature 1..1077: note = Variant of oxalate decarboxylase from Gemmata sp. SH-PL17
  source 1..1077: mol_type = other DNA
atgggtgatccgacctttatgaataatgtgccagaccctctgctggcggataaagatttgccgacgttcaagtttgcactggaaaagagcgagggcaaagtcattgggaaaagttcgggaaaagaagcaaccgttgttcagttacctatctccaaaggcattgctggtgtgagcatgacccttgaaccgggtgcgatgcgcgaattgcactggcatgccacagcagcagagtgggctttcgtattaaccggccacgtccgtacgacggtgatcgatccacaaggtgcggccgaaaccaacgactttggaccgggcgacgtgtggtattttcctcgcggtcatgggcacatgctggaatgcctgggcgataaaccggcgcatttcattctgatcttcgataacggctacttctcagagtttggcaccttctctattactgactggatcggtcacacaccgaaagcgcttctcgccaagaactttgggctgcccgaatcggcttttgatgggtttcccaaagacgaggtctattttgcacgtggcgcggttccaccagccacccctgcagcgcctttacagggacgcaaattgccaccactcacgcataaatacgaactcctcgaacagccgcctcataaagtattcaaaggtggtcgtgaatggcgcgtggatagcacccgttttcccatttccaagactgtaaccggcgttgttcttgatttggaacccggcgcgttacgcgagcttcactggcatcctaatgctgacgagtggcaatatgtgatcgatggcaacattagtgtgacgatgttcggttctcatggccgttaccgcaccgaacagatggagaaaggtgatgtcgggtatattccacaggggtatggccacagcatcgaaaatgtgggagatcgtccttgtcgcgtcttgattggctttaacacaggtaactacgaggccatcgacttatcacaatggattgcaggtaatcccgcggatgttcttgccacgaacttctccaaacccaccagcctctttgaaaagttcccaaaacaggacgtgtttattgctcctggcaag

SEQ ID NO: 1620 - protein, 359 aa, synthetic construct
  REGION 1..359: note = Variant of oxalate decarboxylase from Gemmata sp. SH-PL17
MGDPTFMNNVPDPLLADKDLPTFKFALEKSEGKVIGKSSGKEATVVQLPISKGIAGVSMTLEPGAMRELHWHATAAEWAFVLTGHVRTTVIDPQGAAETNDFGPGDVWYFPRGHGHMLECLGDKPAHFILIFDNGYFSEFGTFSITDWIGHTPKALLAKNFGLPESAFDGFPKDEVYFARGAVPPATPAAPLQGRKLPPLTHKYELLEQPPHKVFKGGREWRVDSTRFPISKTVTGVVLDLEPGALRELHWHPNADEWQYVIDGNISVTMFGSHGRYRTEQMEKGDVGYIPQGYGHSIENVGDRPCRVLIGFNTGNYEAIDLSQWIAGNPADVLATNFSKPTSLFEKFPKQDVFIAPGK

SEQ ID NO: 1621 - DNA, 1077 bp, synthetic construct
  misc_feature 1..1077: note = Variant of oxalate decarboxylase from Gemmata sp. SH-PL17
  source 1..1077: mol_type = other DNA
atgggtgatccgacctttatgaataatgtgccagaccatctgctggcggataaagatttgccgacgttcaagtttgccctggaaaagagcgagggcaaagtcattgggaaaagttcgggaaaagaagcaaccgttgttcagttacctatctccaaaggcattgctggtgtgagcatgactcttgaaccgggtgcgatgcgcgaattgcactggcatgccacagcagcagagtgggcgttcgtattaaccggccacgtccgtacgacggtgatcgatccacaaggtgcggccgaaaccaacgactttggaccgggcgacgtgtggtattttcctcgcggtcatgggcacatgctggaatgcctgggcgataaaccggcgcatttcattctgatcttcgataacggctacttctcagagtttggcaccttctctattactgactggatcggtcacacaccgaaagcgcttctcgccaagaactttgggctgcccgaatcggcttttgatgggtttcccaaagacgaggtctattttgcacgtggcgcggttccaccagccacccctgcagcgcctttacagggacgcaaattgccaccactcacgcataaatacgaactcctcgaacagcctcctcataaagtattcaaaggtggtcgtgaatggcgcgtggatagcacccgttttcccatttccaagactgtaaccggcgttgttcttgatttggaacccggcgcgttacgcgagcttcactggcatcctaatgctgacgagtggcaatatgtgatcgatggcaacattagtgtgacgatgttcggttctcatggccgtcatcgcaccgaacagatggagaaaggtgatgtcgggtatattccacaggggtatggccacagcatcgaaaatgtgggagatcgtccttgtcgcgtcttgattggctttaacacaggtaactacgaggccatcgacttatcacaatggattgcaggtaatcccgcggatgttcttgccacgaacttctccaaacccaccagcctctttgaaaagttcccaaaacaggacgtgtttattgctcctggcaag

SEQ ID NO: 1622 - protein, 359 aa, synthetic construct
  REGION 1..359: note = Variant of oxalate decarboxylase from Gemmata sp. SH-PL17
MGDPTFMNNVPDHLLADKDLPTFKFALEKSEGKVIGKSSGKEATVVQLPISKGIAGVSMTLEPGAMRELHWHATAAEWAFVLTGHVRTTVIDPQGAAETNDFGPGDVWYFPRGHGHMLECLGDKPAHFILIFDNGYFSEFGTFSITDWIGHTPKALLAKNFGLPESAFDGFPKDEVYFARGAVPPATPAAPLQGRKLPPLTHKYELLEQPPHKVFKGGREWRVDSTRFPISKTVTGVVLDLEPGALRELHWHPNADEWQYVIDGNISVTMFGSHGRHRTEQMEKGDVGYIPQGYGHSIENVGDRPCRVLIGFNTGNYEAIDLSQWIAGNPADVLATNFSKPTSLFEKFPKQDVFIAPGK
